(19) United States
(12) Patent Application Publication
(10) Pub. No.: US 2025/0177433 A1
(43) Pub. Date: Jun. 5, 2025

(54) COMPOUNDS AND METHODS FOR REDUCING DMPK EXPRESSION

(71) Applicant: Ionis Pharmaceuticals, Inc., Carlsbad, CA (US)

(72) Inventors: Frank Rigo, Carlsbad, CA (US); Eric E. Swayze, Encinitas, CA (US); Paymaan Jafer-Nejad, Carlsbad, CA (US); Michael Oestergaard, Carlsbad, CA (US); Kar Yun Karen Ling, Carlsbad, CA (US); Susan M. Freier, San Diego, CA (US); Huynh-Hoa Bui, San Diego, CA (US)

(73) Assignee: Ionis Pharmaceuticals, Inc., Carlsbad, CA (US)

(21) Appl. No.: 18/687,221

(22) PCT Filed: Aug. 31, 2022
(86) PCT No.: PCT/US2022/075768

§ 371 Date: Feb. 27, 2024

Related U.S. Application Data
(60) Provisional application No. 63/239,741, filed on Sep. 1, 2021.

(51) Int. Cl. A61K 31/7125; A61P 21/00; C12N 15/11

(52) U.S. Cl. CPC A61K 31/7125; A61P 21/00; C12N 15/11; C12N 2310/314; C12N 2310/315; C12N 2310/32; C12N 2310/3341

(57) ABSTRACT

Provided are oligomeric compounds, methods, and pharmaceutical compositions for DMPK the amount or activity of DMPK RNA in a cell or animal, and in certain instances reducing the amount of DMPK protein in a cell or animal. Such oligomeric compounds, methods, and pharmaceutical compositions are useful to treat type 1 myotonic dystrophy.

### SEQUENCE LISTING

[0001] The present application is being filed along with a Sequence Listing in electronic format. The Sequence Listing is provided as a file entitled BIOL0430WOSEQ.xml, created on Aug. 25, 2022, which is 2,065 KB in size. The information in the electronic format of the sequence listing is incorporated herein by reference in its entirety.

### FIELD

[0002] Provided are oligomeric compounds, methods, and pharmaceutical compositions for reducing the amount or activity of DMPK RNA in a cell or animal, and in certain instances reducing the amount of DMPK protein in a cell or animal. Such oligomeric compounds, methods, and pharmaceutical compositions are useful to treat type 1 myotonic dystrophy (DM1) in an animal.

### BACKGROUND

[0003] Myotonic dystrophy type 1 (DM1) is the most common form of muscular dystrophy in adults with an estimated frequency of 1 in 7,500 (Harper P S., Myotonic Dystrophy. London: W. B. Saunders Company; 2001). DM1 is an autosomal dominant disorder caused by expansion of a non-coding CTG repeat in DMPK1. DMPK1 is a gene encoding a cytosolic serine/threonine kinase (Brook J D, et al., Cell., 1992, 68(4):799-808). The physiologic functions and substrates of this kinase have not been fully determined. The expanded CTG repeat is located in the 3′ untranslated region (UTR) of DMPK1. This mutation leads to RNA dominance, a process in which expression of RNA containing an expanded CUG repeat (CUGexp) induces cell dysfunction (Osborne R J and Thornton C A., Human Molecular Genetics., 2006, 15(2): R162-R169).

[0004] The DMPK gene normally has 5-37 CTG repeats in the 3′ untranslated region. In type 1 myotonic dystrophy, this number is significantly expanded and is, for example, in the range of 50 to greater than 3,500 (Harper, Myotonic Dystrophy (Saunders, London, ed. 3, 2001); Annu. Rev. Neurosci. 29: 259, 2006; EMBO J. 19: 4439, 2000; Curr Opin Neurol. 20: 572, 2007).

[0005] The CUGexp tract interacts with RNA binding proteins including muscleblind-like (MBNL) protein, a splicing factor, and causes the mutant transcript to be retained in nuclear foci. The toxicity of this RNA stems from sequestration of RNA binding proteins and activation of signaling pathways. Studies in animal models have shown that phenotypes of DM1 can be reversed if toxicity of CUGexp RNA is reduced (Wheeler™, et al., Science., 2009, 325(5938):336-339; Mulders S A, et al., Proc Natl Acad Sci USA., 2009, 106(33):13915-13920).

[0006] In DM1, skeletal muscle is the most severely affected tissue, but the disease also has important effects on cardiac and smooth muscle, ocular lens, and brain. The cranial, distal limb, and diaphragm muscles are preferentially affected. Manual dexterity is compromised early, which causes several decades of severe disability. The median age at death is 55 years, usually from respiratory failure (de Die-Smulders C E, et al., Brain., 1998, 121 (Pt 8):1557-1563).

[0007] Antisense technology is emerging as an effective means for modulating expression of certain gene products and may therefore prove to be uniquely useful in a number of therapeutic, diagnostic, and research applications for the modulation of DMPK1.

[0008] Presently there is no treatment that can modify the course of DM1. The burden of disease, therefore, is significant. It is, therefore, an object herein to provide compounds, compositions, and methods for treating DM1.

### SUMMARY

[0009] Oligomeric compounds, methods, and pharmaceutical compositions of certain embodiments described herein are useful for reducing or inhibiting DMPK expression in a cell or animal. In certain embodiments, DMPK RNA or protein levels can be reduced in a cell or animal. In certain embodiments, the subject has type 1 myotonic dystrophy (DM1). In certain embodiments, the subject has a disease or disorder associated with a mutation in DMPK.

[0010] Also provided are methods of treating an animal having type 1 myotonic dystrophy.

### DETAILED DESCRIPTION

[0011] It is to be understood that both the foregoing general description and the following detailed description are exemplary and explanatory only and are not restrictive. Herein, the use of the singular includes the plural unless specifically stated otherwise. As used herein, the use of “or” means “and/or” unless stated otherwise. Furthermore, the use of the term “including” as well as other forms, such as “includes” and “included”, is not limiting. Also, terms such as “element” or “component” encompass both elements and components comprising one unit and elements and components that comprise more than one subunit, unless specifically stated otherwise.

[0012] The section headings used herein are for organizational purposes only and are not to be construed as limiting the subject matter described. All documents, or portions of documents, cited in this application, including, but not limited to, patents, patent applications, articles, books, and treatises, are hereby expressly incorporated-by-reference for the portions of the document discussed herein, as well as in their entirety.

### Definitions

[0013] Unless specific definitions are provided, the nomenclature used in connection with, and the procedures and techniques of, analytical chemistry, synthetic organic chemistry, and medicinal and pharmaceutical chemistry described herein are those well-known and commonly used in the art. Where permitted, all patents, applications, published applications and other publications and other data referred to throughout in the disclosure are incorporated by reference herein in their entirety.

[0014] Unless otherwise indicated, the following terms have the following meanings:

[0015] As used herein, “2′-deoxynucleoside” means a nucleoside comprising a 2′-H(H) deoxyfuranosyl sugar moiety. In certain embodiments, a 2′-deoxynucleoside is a 2′-β-D-deoxynucleoside and comprises a 2′-β-D-deoxyribosyl sugar moiety, which has the β-D ribosyl configuration as found in naturally occurring deoxyribonucleic acids (DNA). In certain embodiments, a 2′-deoxynucleoside may comprise a modified nucleobase or may comprise an RNA nucleobase (uracil).

[0016] As used herein, “2′-MOE” means a 2′-OCH₂CH₂OCH₃ group in place of the 2′-OH group of a furanosyl sugar moiety. A “2′-MOE sugar moiety” means a sugar moiety with a 2′-OCH₂CH₂OCH₃ group in place of the 2′-OH group of a furanosyl sugar moiety. Unless otherwise indicated, a 2′-MOE sugar moiety is in the β-D-ribosyl configuration. “MOE” means O-methoxyethyl.

[0017] As used herein, “2′-MOE nucleoside” means a nucleoside comprising a 2′-MOE sugar moiety.

[0018] As used herein, “2′-OMe” means a 2′-OCH₃ group in place of the 2′-OH group of a furanosyl sugar moiety. A “2′-O-methyl sugar moiety” or “2′-OMe sugar moiety” means a sugar moiety with a 2′-OCH₃ group in place of the 2′-OH group of a furanosyl sugar moiety. Unless otherwise indicated, a 2′-OMe sugar moiety is in the β-D-ribosyl configuration.

[0019] As used herein, “2′-OMe nucleoside” means a nucleoside comprising a 2′-OMe sugar moiety.

[0020] As used herein, “5-methylcytosine” means a cytosine modified with a methyl group attached to the 5 position. A 5-methylcytosine is a modified nucleobase.

[0021] As used herein, “ameliorate” in reference to a treatment means improvement in at least one symptom or hallmark relative to the same symptom or hallmark in the absence of the treatment. In certain embodiments, amelioration is the reduction in the severity or frequency of a symptom or hallmark or the delayed onset or slowing of progression in the severity or frequency of a symptom or hallmark. In certain embodiments, the symptom or hallmark is one or more of muscle stiffness, myotonia, disabling distal weakness, weakness in face and jaw muscles, difficulty in swallowing, drooping of the eyelids (ptosis), weakness of neck muscles, weakness in arm and leg muscles, persistent muscle pain, hypersomnia, muscle wasting, dysphagia, respiratory insufficiency, irregular heartbeat, heart muscle damage, apathy, insulin resistance, and cataracts.

[0022] As used herein, “antisense agent” means an antisense compound and optionally one or more additional features, such as a sense compound.

[0023] As used herein, “cerebrospinal fluid” or “CSF” means the fluid filling the space around the brain and spinal cord. “Artificial cerebrospinal fluid” or “aCSF” means a prepared or manufactured fluid that has certain properties (e.g., osmolarity, pH, and/or electrolytes) of cerebrospinal fluid and is biocompatible with CSF.

[0024] As used herein, “conjugate group” means a group of atoms that is directly attached to an oligonucleotide. Conjugate groups include a conjugate moiety and a conjugate linker that attaches the conjugate moiety to the oligonucleotide.

[0025] As used herein, “conjugate linker” means a single bond or a group of atoms comprising at least one bond that connects a conjugate moiety to an oligonucleotide.

[0026] As used herein, “conjugate moiety” means a group of atoms that modifies one or more properties of a molecule compared to the identical molecule lacking the conjugate moiety, including but not limited to pharmacodynamics, pharmacokinetics, stability, binding, absorption, tissue distribution, cellular distribution, cellular uptake, charge and clearance.

[0027] As used herein, “constrained ethyl” or “cEt” or “cEt sugar moiety” means a β-D ribosyl bicyclic sugar moiety wherein the second ring of the bicyclic sugar is formed via a bridge connecting the 4′-carbon and the 2′-carbon of the β-D ribosyl sugar moiety, wherein the bridge has the formula 4′-CH(CH₃)—O-2′, and wherein the methyl group of the bridge is in the S configuration.

[0028] As used herein, “cEt nucleoside” means a nucleoside comprising a cEt sugar moiety.

[0029] As used herein, “deoxy region” means a region of 5-12 contiguous nucleotides, wherein at least 70% of the nucleosides comprise a β-D-2′-deoxyribosyl sugar moiety. In certain embodiments, a deoxy region is the gap of a gapmer.

[0030] As used herein, “internucleoside linkage” is the covalent linkage between adjacent nucleosides in an oligonucleotide. As used herein “modified internucleoside linkage” means any internucleoside linkage other than a phosphodiester internucleoside linkage.

[0031] As used herein, “linked nucleosides” are nucleosides that are connected in a contiguous sequence (i.e., no additional nucleosides are presented between those that are linked).

[0032] As used herein, “motif” means the pattern of unmodified and/or modified sugar moieties, nucleobases, and/or internucleoside linkages, in an oligonucleotide.

[0033] As used herein, “modified nucleoside” means a nucleoside comprising a modified nucleobase and/or a modified sugar moiety.

[0034] As used herein, “non-bicyclic modified sugar moiety” means a modified sugar moiety that comprises a modification, such as a substituent, that does not form a bridge between two atoms of the sugar to form a second ring.

[0035] As used herein, “nucleobase” means an unmodified nucleobase or a modified nucleobase. A nucleobase is a heterocyclic moiety. As used herein an “unmodified nucleobase” is adenine (A), thymine (T), cytosine (C), uracil (U), or guanine (G). As used herein, a “modified nucleobase” is a group of atoms other than unmodified A, T, C, U, or G capable of pairing with at least one other nucleobase. A “5-methylcytosine” is a modified nucleobase. A universal base is a modified nucleobase that can pair with any one of the five unmodified nucleobases.

[0036] As used herein, “nucleobase sequence” means the order of contiguous nucleobases in a nucleic acid or oligonucleotide independent of any sugar or internucleoside linkage modification.

[0037] As used herein, “nucleoside” means a compound or fragment of a compound comprising a nucleobase and a sugar moiety. The nucleobase and sugar moiety are each, independently, unmodified or modified.

[0038] As used herein, “oligomeric compound” means an oligonucleotide and optionally one or more additional features, such as a conjugate group or terminal group. An oligomeric compound may be paired with a second oligomeric compound that is complementary to the first oligomeric compound or may be unpaired. A “singled-stranded oligomeric compound” is an unpaired oligomeric compound.

[0039] As used herein, “oligonucleotide” means a strand of linked nucleosides connected via internucleoside linkages, wherein each nucleoside and internucleoside linkage may be modified or unmodified. Unless otherwise indicated, oligonucleotides consist of 8-50 linked nucleosides. As used herein, “modified oligonucleotide” means an oligonucleotide, wherein at least one nucleoside or internucleoside linkage is modified. As used herein, “unmodified oligonucleotide” means an oligonucleotide that does not comprise any nucleoside modifications or internucleoside modifications.

[0040] As used herein, “pharmaceutically acceptable carrier or diluent” means any substance suitable for use in administering to an animal. Certain such carriers enable pharmaceutical compositions to be formulated as, for example, tablets, pills, dragees, capsules, liquids, gels, syrups, slurries, suspension and lozenges for the oral ingestion by a subject. In certain embodiments, a pharmaceutically acceptable carrier or diluent is sterile water, sterile saline, sterile buffer solution, or sterile artificial cerebrospinal fluid.

[0041] As used herein “pharmaceutically acceptable salts” means physiologically and pharmaceutically acceptable salts of compounds. Pharmaceutically acceptable salts retain the desired biological activity of the parent compound and do not impart undesired toxicological effects thereto.

[0042] As used herein “pharmaceutical composition” means a mixture of substances suitable for administering to a subject. For example, a pharmaceutical composition may comprise an oligomeric compound and a sterile aqueous solution. In certain embodiments, a pharmaceutical composition shows activity in free uptake assay in certain cell lines.

[0043] As used herein, “prodrug” means an inactive or less active form of a compound which, when administered to a subject, is metabolized to form the active, or more active, compound. In certain embodiments, a prodrug comprises a cell-targeting moiety and at least one active compound.

[0044] As used herein, “stereorandom” or “stereorandom chiral center” in the context of a population of molecules of identical molecular formula means a chiral center that is not controlled during synthesis, or enriched following synthesis, for a particular absolute stereochemical configuration. The stereochemical configuration of a chiral center is random when it is the result of a synthetic method that is not designed to control the stereochemical configuration. For example, in a population of molecules comprising a stereorandom chiral center, the number of molecules having the (S) configuration of the stereorandom chiral center may be but is not necessarily the same as the number of molecules having the (R) configuration of the stereorandom chiral center (“racemic”). In certain embodiments, the stereorandom chiral center is not racemic because one absolute configuration predominates following synthesis, e.g., due to the action of non-chiral reagents near the enriched stereochemistry of an adjacent sugar moiety. In certain embodiments, the stereorandom chiral center is at the phosphorous atom of a stereorandom phosphorothioate internucleoside linkage.

[0045] As used herein, “sugar moiety” means an unmodified sugar moiety or a modified sugar moiety. As used herein, “unmodified sugar moiety” means a 2′-OH(H) ribosyl moiety, as found in RNA (an “unmodified RNA sugar moiety”), or a 2′-H(H) deoxyribosyl sugar moiety, as found in DNA (an “unmodified DNA sugar moiety”). Unmodified sugar moieties have one hydrogen at each of the 1′, 3′, and 4′ positions, an oxygen at the 3′ position, and two hydrogens at the 5′ position. As used herein, “modified sugar moiety” or “modified sugar” means a modified furanosyl sugar moiety or a sugar surrogate.

[0046] As used herein, “symptom or hallmark” means any physical feature or test result that indicates the existence or extent of a disease or disorder. In certain embodiments, a symptom is apparent to a subject or to a medical professional examining or testing said subject. In certain embodiments, a hallmark is apparent upon invasive diagnostic testing, including, but not limited to, post-mortem tests.

[0047] As used herein, “target nucleic acid” and “target RNA” mean a nucleic acid that an oligomeric compound is designed to affect. Target RNA means an RNA transcript and includes pre-mRNA and mRNA unless otherwise specified.

[0048] As used herein, “target region” means a portion of a target nucleic acid to which an oligomeric compound is designed to hybridize.

[0049] As used herein, “terminal group” means a chemical group or group of atoms that is covalently linked to a terminus of an oligonucleotide.

[0050] As used herein, “antisense activity” means any detectable and/or measurable change attributable to the hybridization of an antisense compound to its target nucleic acid. In certain embodiments, antisense activity is a decrease in the amount or expression of a target nucleic acid or protein encoded by such target nucleic acid compared to target nucleic acid levels or target protein levels in the absence of the antisense compound.

[0051] As used herein, “gapmer” means a modified oligonucleotide comprising an internal region positioned between external regions having one or more nucleosides, wherein the nucleosides comprising the internal region are chemically distinct from the nucleoside or nucleosides comprising the external regions, and wherein the modified oligonucleotide supports RNAse H cleavage. The internal region may be referred to as the “gap” and the external regions may be referred to as the “wings.” In certain embodiments, the internal region is a deoxy region. The positions of the internal region or gap refer to the order of the nucleosides of the internal region and are counted starting from the 5′-end of the internal region. Unless otherwise indicated, “gapmer” refers to a sugar motif. In certain embodiments, each nucleoside of the gap is a 2′-β-D-deoxynucleoside. As used herein, the term “MOE gapmer” indicates a gapmer having a gap comprising 2′-β-D-deoxynucleosides and wings comprising 2′-MOE nucleosides. As used herein, the term “cEt gapmer” indicates a gapmer having a gap comprising 2′-β-D-deoxynucleosides and wings comprising cEt nucleosides. Unless otherwise indicated, a gapmer may comprise one or more modified internucleoside linkages and/or modified nucleobases and such modifications do not necessarily follow the gapmer pattern of the sugar modifications.

[0052] As used herein, “hybridization” means the annealing of oligonucleotides and/or nucleic acids. While not limited to a particular mechanism, the most common mechanism of hybridization involves hydrogen bonding, which may be Watson-Crick, Hoogsteen or reversed Hoogsteen hydrogen bonding, between complementary nucleobases. In certain embodiments, complementary nucleic acid molecules include, but are not limited to, an antisense compound and a nucleic acid target. In certain embodiments, complementary nucleic acid molecules include, but are not limited to, an oligonucleotide and a nucleic acid target.

[0053] As used herein, “RNAi agent” means an antisense agent that acts, at least in part, through RISC or Ago2 to modulate a target nucleic acid and/or protein encoded by a target nucleic acid. RNAi agents include, but are not limited to double-stranded siRNA, single-stranded RNAi (ssRNAi), and microRNA, including microRNA mimics. RNAi agents may comprise conjugate groups and/or terminal groups. In certain embodiments, an RNAi agent modulates the amount and/or activity, of a target nucleic acid. The term RNAi agent excludes antisense agents that act through RNase H.

[0054] As used herein, “RNase H agent” means an antisense agent that acts through RNase H to modulate a target nucleic acid and/or protein encoded by a target nucleic acid. In certain embodiments, RNase H agents are single-stranded. In certain embodiments, RNase H agents are double-stranded. RNase H compounds may comprise conjugate groups and/or terminal groups. In certain embodiments, an RNase H agent modulates the amount and/or activity of a target nucleic acid. The term RNase H agent excludes antisense agents that act principally through RISC/Ago2.

[0055] As used herein, “standard cell assay” means the assays described in Examples 1-3, and reasonable variations thereof.

[0056] As used herein, “treating” means improving a subject's disease or condition by administering an oligomeric compound described herein. In certain embodiments, treating a subject improves a symptom relative to the same symptom in the absence of the treatment. In certain embodiments, treatment reduces in the severity or frequency of a symptom, or delays the onset of a symptom, slows the progression of a symptom, or slows the severity or frequency of a symptom.

[0057] As used herein, “therapeutically effective amount” means an amount of a pharmaceutical agent or composition that provides a therapeutic benefit to an animal. For example, a therapeutically effective amount improves a symptom of a disease.

### Certain Embodiments

[0058] Embodiment 1. An oligomeric compound comprising a modified oligonucleotide consisting of 12 to 30 linked nucleosides, wherein the nucleobase sequence of the modified oligonucleotide is at least 80% complementary to an equal length portion of a DMPK nucleic acid, and wherein the modified oligonucleotide has at least one modification selected from a modified sugar moiety and a modified internucleoside linkage.

[0059] Embodiment 2. The oligomeric compound of embodiment 1, wherein the DMPK nucleic acid has the nucleobase sequence of SEQ ID NO: 1 or SEQ ID NO: 2.

[0060] Embodiment 3. The oligomeric compound of embodiment 1 or embodiment 2, wherein the nucleobase sequence of the modified oligonucleotide is at least 80% complementary to an equal length portion within:
[0061] nucleobases 9052-9103 of SEQ ID NO: 1;
[0062] nucleobases 9228-9256 of SEQ ID NO: 1;
[0063] nucleobases 9574-9610 of SEQ ID NO: 1;
[0064] nucleobases 10010-10043 of SEQ ID NO: 1;
[0065] nucleobases 10271-10298 of SEQ ID NO: 1;
[0066] nucleobases 10364-10391 of SEQ ID NO: 1;
[0067] nucleobases 10683-10707 of SEQ ID NO: 1;
[0068] nucleobases 10709-10734 of SEQ ID NO: 1;
[0069] nucleobases 10812-10857 of SEQ ID NO: 1;
[0070] nucleobases 11853-11879 of SEQ ID NO: 1;
[0071] nucleobases 13310-13350 of SEQ ID NO: 1;
[0072] nucleobases 13999-14046 of SEQ ID NO: 1;
[0073] nucleobases 14090-14118 of SEQ ID NO: 1;
[0074] nucleobases 14232-14258 of SEQ ID NO: 1;
[0075] nucleobases 17565-17594 of SEQ ID NO: 1;
[0076] nucleobases 17731-17761 of SEQ ID NO: 1;
[0077] nucleobases 19719-19753 of SEQ ID NO: 1;
[0078] nucleobases 19795-19869 of SEQ ID NO: 1;
[0079] nucleobases 19888-19942 of SEQ ID NO: 1;
[0080] nucleobases 19915-19942 of SEQ ID NO: 1;
[0081] nucleobases 20871-20905 of SEQ ID NO: 1;
[0082] nucleobases 21117-21153 of SEQ ID NO: 1; or
[0083] nucleobases 22118-22143 of SEQ ID NO: 1.

[0084] Embodiment 4. The oligomeric compound of any of embodiments 1-3, wherein the modified oligonucleotide has a nucleobase sequence comprising at least 12, 13, 14, 15, or 16 contiguous nucleobases of a nucleobase sequence selected from:
[0085] SEQ ID Nos: 132, 186, 256, 327, 446, 1374, 1596, 1667, 1747, 1818, 1895, 1964, 2038, 2121, 2191;
[0086] SEQ ID NOs: 510, 1173, 1668, 1748, 1819, 1896;
[0087] SEQ ID NOs: 1376, 1448, 1526, 1599, 1670;
[0088] SEQ ID NOs: 1823, 1900, 1969, 2043;
[0089] SEQ ID NOs: 1380, 1452, 1530, 1901, 1970, 2044, 2127, 2197;
[0090] SEQ ID NOs: 1206, 1381, 1453, 1531, 1604, 1971, 2045, 2128, 2198;
[0091] SEQ ID NOs: 640, 714, 821, 1172, 1677, 1757, 1828;
[0092] SEQ ID NOs: 43, 115, 202, 900, 960, 1027, 1195, 1905;
[0093] SEQ ID NOs: 1384, 1456, 1534, 1607, 1678, 1758;
[0094] SEQ ID NOs: 1387, 1977, 2051, 2134, 2204;
[0095] SEQ ID NOs: 1296, 1351, 1425, 1501, 1793, 1867, 1979, 2052, 2083, 2092, 2206;
[0096] SEQ ID NOs: 49, 159, 208, 293, 402, 471, 556, 618, 676, 692, 754, 817, 901, 971, 1038, 1744, 1791, 1863, 1960, 2016, 2119, 2163;
[0097] SEQ ID NOs: 1718, 1814, 1891, 1941;
[0098] SEQ ID NOs: 41, 140, 888, 981, 1033, 2081, 2154;
[0099] SEQ ID NOs: 444, 508, 573, 1874, 1949, 2060, 2103;
[0100] SEQ ID NOs: 274, 337, 410, 526, 575, 665, 712, 829, 897, 1397, 1467, 2138, 2210, 2270;
[0101] SEQ ID NOs: 1432, 1509, 1580, 1654, 1729, 1801;
[0102] SEQ ID NOs: 355, 412, 506, 567, 673, 747, 832, 904, 956, 1399, 1469, 1545, 1581, 1655, 1730, 1841, 1916, 1988, 1989, 2027, 2106, 2177;
[0103] SEQ ID Nos: 160, 249, 313, 371, 424, 503, 588, 647, 755, 789, 882, 1248-1254, 1263-1264, 1266-1273, 1284-1285, 1332, 1400, 1489, 1619, 1637, 1638, 1639, 1656, 1709, 2006, 2079, 2082, 2085, 2153, 2303;
[0104] SEQ ID NOs: 503, 588, 647, 755, 789, 882, 1263, 1264, 1332, 1400, 1619, 1637, 1638, 1639, 1656, 1709, 2006, 2079, 2082, 2085, 2153, 2303;
[0105] SEQ ID NOs: 144, 233, 291, 328, 435, 482, 564, 642, 748, 808, 874, 955, 1339, 1340, 1341, 1492, 1732, 1803, 2321, 2322, 2323;
[0106] SEQ ID NOs: 576, 652, 724, 811, 870, 1359, 1433, 1510, 1583, 1692;
[0107] SEQ ID NOs: 696, 1255-1259, 1265, 1274-1277, 1283, 1330, and 1331.

[0108] Embodiment 5. The oligomeric compound of any of embodiments 1-4, wherein the nucleobase sequence of the modified oligonucleotide is at least 85%, at least 90%, at least 95%, or 100% complementary to an equal length portion of the DMPK nucleic acid.

[0109] Embodiment 6. An oligomeric compound, wherein the oligomeric compound comprises a modified oligonucleotide consisting of 12 to 30 linked nucleosides, wherein the nucleobase sequence of the modified oligonucleotide comprises at least 8, at least 9, at least 10, at least 11, at least 12, at least 13, at least 14, at least 15, or at least 16 contiguous nucleobases of the nucleobase sequences of any of SEQ ID NOs: 18-2334, and wherein the modified oligonucleotide has at least one modification selected from a modified sugar moiety and a modified internucleoside linkage.

[0110] Embodiment 7. An oligomeric compound, wherein the oligomeric compound comprises a modified oligonucleotide consisting of 12 to 30 linked nucleosides, wherein the nucleobase sequence of the modified oligonucleotide comprises at least 8, at least 9, at least 10, at least 11, at least 12, at least 13, at least 14, at least 15, at least 16, at least 17, at least 18, at least 19, or 20 contiguous nucleobases of the nucleobase sequences of any of SEQ ID NOs: 18-1264 or 1278-1329, and wherein the modified oligonucleotide has at least one modification selected from a modified sugar moiety and a modified internucleoside linkage.

[0111] Embodiment 8. The oligomeric compound of embodiment 6 or embodiment 7, wherein the modified oligonucleotide has a nucleobase sequence comprising the nucleobase sequence of any of SEQ ID NOs: 18-2334.

[0112] Embodiment 9. The oligomeric compound of embodiment 8, wherein the modified oligonucleotide has a nucleobase sequence consisting of the nucleobase sequence of any of SEQ ID NOs: 18-2334.

[0113] Embodiment 10. The oligomeric compound of any of embodiments 6-9, wherein the nucleobase sequence of the modified oligonucleotide is at least 85%, at least 90%, at least 95%, or 100% complementary to an equal length portion of a DMPK nucleic acid, wherein the DMPK nucleic acid has the nucleobase sequence of SEQ ID NO: 1 or SEQ ID NO: 2.

[0114] Embodiment 11. The oligomeric compound of any of embodiments 1-10, wherein the modified oligonucleotide consists of 12 to 20, 14 to 20, 15 to 20, 16 to 18, 16 to 20, 17 to 20, 18 to 20, or 18 to 22 linked nucleosides.

[0115] Embodiment 12. The oligomeric compound of any of embodiments 1-10, wherein the modified oligonucleotide consists of 16 linked nucleosides.

[0116] Embodiment 13. The oligomeric compound of any of embodiments 1-10, wherein the modified oligonucleotide consists of 18 linked nucleosides.

[0117] Embodiment 14. The oligomeric compound of any of embodiments 1-10, wherein the modified oligonucleotide consists of 20 linked nucleosides.

[0118] Embodiment 15. The oligomeric compound of any of embodiments 1-14, wherein at least one nucleoside of the modified oligonucleotide comprises a modified sugar moiety.

[0119] Embodiment 16. The oligomeric compound of embodiment 15, wherein the modified sugar moiety comprises a bicyclic sugar moiety.

[0120] Embodiment 17. The oligomeric compound of embodiment 16, wherein the bicyclic sugar moiety comprises a 2′-4′ bridge selected from —O—CH₂—; and —O—CH(CH₃)—.

[0121] Embodiment 18. The oligomeric compound of embodiment 15, wherein the modified sugar moiety comprises a non-bicyclic modified sugar moiety.

[0122] Embodiment 19. The oligomeric compound of embodiment 18, wherein the non-bicyclic modified sugar moiety is a 2′-MOE sugar moiety or 2′-OMe sugar moiety.

[0123] Embodiment 20. The oligomeric compound of any of embodiments 1-19, wherein at least one nucleoside of the modified oligonucleotide compound comprises a sugar surrogate.

[0124] Embodiment 21. The oligomeric compound of any of embodiments 1-20, wherein the modified oligonucleotide comprises at least one modified internucleoside linkage.

[0125] Embodiment 22. The oligomeric compound of embodiment 21, wherein at least one modified internucleoside linkage is a phosphorothioate internucleoside linkage.

[0126] Embodiment 23. The oligomeric compound of embodiment 21, wherein at least one modified internucleoside linkage is a mesyl phosphoramidate internucleoside linkage.

[0127] Embodiment 24. The oligomeric compound of any of embodiments 21-23, wherein each internucleoside linkage is a modified internucleoside linkage.

[0128] Embodiment 25. The oligomeric compound of embodiment 24, wherein each internucleoside linkage is a phosphorothioate internucleoside linkage.

[0129] Embodiment 26. The oligomeric compound of any of embodiments 21-23, wherein at least one internucleoside linkage of the modified oligonucleotide is a phosphodiester internucleoside linkage.

[0130] Embodiment 27. The oligomeric compound of any of embodiments 1-23 or 25-26, wherein each internucleoside linkage of the modified oligonucleotide is independently selected from a phosphodiester or a phosphorothioate internucleoside linkage.

[0131] Embodiment 28. The oligomeric compound of any of embodiments 1-23 or 25-26, wherein each internucleoside linkage of the modified oligonucleotide is independently selected from a phosphodiester internucleoside linkage, a phosphorothioate internucleoside linkage, or a mesyl phosphoramidate internucleoside linkage.

[0132] Embodiment 29. The oligomeric compound of any of embodiments 1-23 or 26-28, wherein at least 10, at least 11, at least 12, at least 13, at least 14, at least 15, at least 16, at least 17, or at least 18 internucleoside linkages of the modified oligonucleotide are phosphorothioate internucleoside linkages.

[0133] Embodiment 30. The oligomeric compound of any of embodiments 1-23 or 26-29, wherein at least 1, at least 2, at least 3, at least 4, or at least 5 internucleoside linkages of the modified oligonucleotide are mesyl phosphoramidate internucleoside linkages.

[0134] Embodiment 31. The oligomeric compound of embodiment 21, wherein the internucleoside linkage motif of the modified oligonucleotide is selected from soooossssssssssooss, sssssssssssssss, sooossssssssssoooss, soosssssssssoooss, sooosssssssssooss, sooooossssssssssoss, soooosssssssssoss, ssssxssssssssss, sssssssssssss, soossssssssssos, sosssssssssssos, soosxssssssssos, ooooxoooooooooo, sssssxsssssssss, soossxsssssssos, wherein each “s” represents a phosphorothioate internucleoside linkage, each “o” represents a phosphodiester internucleoside linkage, and each “x” represents a methoxypropyl phosphonate internucleoside linkage.

[0135] Embodiment 32. The oligomeric compound of any of embodiments 1-31, wherein the modified oligonucleotide comprises at least one modified nucleobase.

[0136] Embodiment 33. The oligomeric compound of embodiment 32, wherein the modified nucleobase is 5-methylcytosine.

[0137] Embodiment 34. The oligomeric compound of embodiment 33, wherein each cytosine is a 5-methylcytosine.

[0138] Embodiment 35. The oligomeric compound of any of embodiments 1-34, wherein the modified oligonucleotide comprises a deoxy region.

[0139] Embodiment 36. The oligomeric compound of embodiment 35, wherein each nucleoside of the deoxy region is a 2′-β-D-deoxynucleoside.

[0140] Embodiment 37. The oligomeric compound of embodiment 35 or embodiment 36, wherein the deoxy region consists of 6, 7, 8, 9, 10, or 6-10 linked nucleosides.

[0141] Embodiment 38. The oligomeric compound of any of embodiments 35-37, wherein each nucleoside immediately adjacent to the deoxy region comprises a modified sugar moiety.

[0142] Embodiment 39. The oligomeric compound of any of embodiments 35-37, wherein the deoxy region is flanked on the 5′-side by a 5′-external region consisting of 1-6 linked 5′-external region nucleosides and on the 3′-side by a 3′-external region consisting of 1-6 linked 3′-external region nucleosides; wherein
[0143] the 3′-most nucleoside of the 5′ external region comprises a modified sugar moiety; and
[0144] the 5′-most nucleoside of the 3′ external region comprises a modified sugar moiety.

[0145] Embodiment 40. The oligomeric compound of embodiment 39, wherein each nucleoside of the 3′ external region comprises a modified sugar moiety.

[0146] Embodiment 41. The oligomeric compound of embodiment 39 or embodiment 40, wherein each nucleoside of the 5′ external region comprises a modified sugar moiety.

[0147] Embodiment 42. The oligomeric compound of any of embodiments 39-41, wherein the modified oligonucleotide has:
[0148] a 5′ external region consisting of 5 linked nucleosides;
[0149] a deoxy region consisting of 10 linked nucleosides; and
[0150] a 3′ external region consisting of 5 linked nucleosides;
   wherein each of the 5′ external region nucleosides and each of the 3′ external region nucleosides is a 2′-MOE nucleoside.

[0151] Embodiment 43. The oligomeric compound of any of embodiments 39-41, wherein the modified oligonucleotide has:
[0152] a 5′ external region consisting of 6 linked nucleosides;
[0153] a deoxy region consisting of 10 linked nucleosides; and
[0154] a 3′ external region consisting of 4 linked nucleosides;
   wherein each of the 5′ external region nucleosides and each of the 3′ external region nucleosides is a 2′-MOE nucleoside.

[0155] Embodiment 44. The oligomeric compound of any of embodiments 39-41, wherein the modified oligonucleotide has:
[0156] a 5′ external region consisting of 4 linked nucleosides;
[0157] a deoxy region consisting of 10 linked nucleosides; and
[0158] a 3′ external region consisting of 6 linked nucleosides;
   wherein each of the 5′ external region nucleosides and each of the 3′ external region nucleosides is a 2′-MOE nucleoside.

[0159] Embodiment 45. The oligomeric compound of any of embodiments 39-41, wherein the modified oligonucleotide has:
[0160] a 5′ external region consisting of 3 linked nucleosides;
[0161] a deoxy region consisting of 10 linked nucleosides; and
[0162] a 3′ external region consisting of 3 linked nucleosides;
   wherein each of the 5′ external region nucleosides and each of the 3′ external region nucleosides is a cEt nucleoside.

[0163] Embodiment 46. The oligomeric compound of any of embodiments 39-41, wherein the modified oligonucleotide has:
[0164] a 5′ external region consisting of 1-6 linked nucleosides;
[0165] a deoxy region consisting of 6-10 linked nucleosides; and
[0166] a 3′ external region consisting of 1-6 linked nucleosides;
   wherein each of the 5′ external region nucleosides and each of the 3′ external region nucleosides is a cEt nucleoside or a 2′-MOE nucleoside; and each of the deoxy region nucleosides is a 2′-β-D-deoxynucleoside.

[0167] Embodiment 47. The oligomeric compound of any of embodiments 39-41, wherein the modified oligonucleotide has a sugar motif comprising:
[0168] a 5′ external region consisting of 3-6 linked nucleosides;
[0169] a deoxy region consisting of 7-8 linked nucleosides; and
[0170] a 3′ external region consisting of 3-6 linked nucleosides; wherein
[0171] each of the 3′ external region nucleosides is selected from a 2′-MOE nucleoside and a cEt nucleoside, and the 5′ external region has the following formula:

(Nk)n(Nd)(Nx)
[0172] wherein each Nk is a bicyclic nucleoside, Nx 2′-OMe nucleoside and Nd is a 2′-β-D-deoxynucleoside; and n is from 1-4.

[0173] Embodiment 48. An oligomeric compound of any of embodiments 1-38, wherein the modified oligonucleotide has a sugar motif (5′ to 3′) selected from: eeeeeddddddddddeeeee, kkkddddddddddkkk, eekkddddddddkkee, eeeeddddddddddeeeeee, eeeeddddddddeeeeee, eeeeeddddddddeeeee, eeeeeeddddddddddeeee, eeeeeeddddddddeeee, kkkedddddddddkkk, kkkdyddddddddkkk, kkeddddddddddkkk, kekddddddddddkkk, ekkddddddddddkke, kkddddddddddkk, ekkkddddddddkkke, ekkddddddddddkkk, kkkddddddddddkke, kkkdd[5′-(S)-Me-d]dddddddkkk, kkkdd[5′-(R)-Me-d]dddddddkkk, kkkdd[5′-(R)-allyl-d]dddddddkkk, kkkddd[5′-(R)-Me-d]ddddddkkk, wherein each “d” represents a 2′-β-D-deoxyribosyl sugar moiety, each “e” represents a 2′-MOE sugar moiety, each “y” represents a 2′-OMe sugar moiety, each “[5′-(S)-Me-d]” represents a 5′-(S)-methyl-β-D-2′-deoxyribosyl sugar moiety, each “[5′-(R)-Me-d]” represents a 5′-(R)-methyl-β-D-2′-deoxyribosyl sugar moiety, and each “[5′-(R)-allyl-d]” represents a 5′-(R)-allyl-β-D-2′-deoxyribosyl sugar moiety, and each “k” represents a cEt sugar moiety.

[0174] Embodiment 49. The oligomeric compound of any of embodiments 1-48, wherein the oligomeric compound comprises a conjugate group.

[0175] Embodiment 50. The oligomeric compound of embodiment 49, wherein the conjugate group comprises a conjugate linker and a conjugate moiety.

[0176] Embodiment 51. The oligomeric compound of embodiment 50, wherein the conjugate moiety is a lipophilic group.

[0177] Embodiment 52. The oligomeric compound of embodiment 50, wherein the conjugate moiety is selected from a C22 alkyl, C20 alkyl, C16 alkyl, C10 alkyl, C21 alkyl, C19 alkyl, C18 alkyl, C15 alkyl, C14 alkyl, C13 alkyl, C12 alkyl, C11 alkyl, C9 alkyl, C8 alkyl, C7 alkyl, C6 alkyl, C5 alkyl, C22 alkenyl, C20 alkenyl, C16 alkenyl, C10 alkenyl, C21 alkenyl, C19 alkenyl, C18 alkenyl, C15 alkenyl, C14 alkenyl, C13 alkenyl, C12 alkenyl, C11 alkenyl, C9 alkenyl, C8 alkenyl, C7 alkenyl, C6 alkenyl, or C5 alkenyl.

[0178] Embodiment 53. The oligomeric compound of embodiment 50, wherein the conjugate moiety is a 6-palmitamidohexyl conjugate moiety.

[0179] Embodiment 54. The oligomeric compound of any of embodiments 50-53 wherein the conjugate linker is a phosphodiester linker.

[0180] Embodiment 55. The oligomeric compound of any one of embodiments 49-54, wherein the conjugate group has the following structure:

[chemical structure]

[0181] Embodiment 56. The oligomeric compound of any of embodiments 50-54, wherein the conjugate linker consists of a single bond.

[0182] Embodiment 57. The oligomeric compound of any of embodiments 50-56, wherein the conjugate linker is cleavable.

[0183] Embodiment 58. The oligomeric compound of any of embodiments 50-57, wherein the conjugate linker comprises 1-3 linker-nucleosides.

[0184] Embodiment 59. The oligomeric compound of any of embodiments 50-58, wherein the conjugate linker does not comprise any linker nucleosides.

[0185] Embodiment 60. The oligomeric compound of any of embodiments 49-59, wherein the conjugate group is attached to the modified oligonucleotide at the 5′-end of the modified oligonucleotide.

[0186] Embodiment 61. The oligomeric compound of any of embodiments 49-59, wherein the conjugate group is attached to the modified oligonucleotide at the 3′-end of the modified oligonucleotide.

[0187] Embodiment 62. The oligomeric compound of any of embodiments 49-61, wherein the conjugate group comprises a cell-targeting moiety.

[0188] Embodiment 63. A population of oligomeric compounds of any of embodiments 1-62, wherein the population is chirally enriched for modified oligonucleotides comprising at least one particular phosphorothioate internucleoside linkage having a particular stereochemical configuration.

[0189] Embodiment 64. The population of embodiment 63, wherein the population is chirally enriched for modified oligonucleotides comprising at least one particular phosphorothioate internucleoside linkage having the (Sp) or (Rp) configuration.

[0190] Embodiment 65. The population of embodiment 63, wherein the population is chirally enriched for modified oligonucleotides having a particular, independently selected stereochemical configuration at each phosphorothioate internucleoside linkage.

[0191] Embodiment 66. The population of embodiment 63, wherein the population is chirally enriched for modified oligonucleotides having the (Rp) configuration at one particular phosphorothioate internucleoside linkage and the (Sp) configuration at each of the remaining phosphorothioate internucleoside linkages.

[0192] Embodiment 67. The population of embodiment 63, wherein the population is chirally enriched for modified oligonucleotides having at least 3 contiguous phosphorothioate internucleoside linkages in the Sp, Sp, and Rp configurations, in the 5′ to 3′ direction.

[0193] Embodiment 68. A population of oligomeric compounds of any of embodiments 1-63, wherein all of the phosphorothioate internucleoside linkages of the modified oligonucleotide are stereorandom.

[0194] Embodiment 69. An oligomeric duplex, comprising a first oligomeric compound and a second oligomeric compound comprising a second modified oligonucleotide, wherein the first oligomeric compound is an oligomeric compound of any of embodiments 1-63.

[0195] Embodiment 70. The oligomeric duplex of embodiment 69, wherein the second modified oligonucleotide consists of 8 to 80 linked nucleosides, and wherein the nucleobase sequence of the second modified oligonucleotide comprises a complementary region of at least 8 nucleobases that is at least 90% complementary to an equal length portion of the first modified oligonucleotide.

[0196] Embodiment 71. An antisense agent comprising an antisense compound, wherein the antisense compound is the oligomeric compound of any of embodiments 1-62.

[0197] Embodiment 72. The antisense agent of embodiment 71, wherein the antisense agent is an RNase H agent capable of reducing the amount of DMPK nucleic acid through activation of RNase H.

[0198] Embodiment 73. The antisense agent of any of embodiments 71-72, wherein the antisense agent comprises a conjugate group, wherein the conjugate group comprises a cell-targeting moiety.

[0199] Embodiment 74. A pharmaceutical composition comprising an oligomeric compound of any of embodiments 1-62, a population of any of embodiments 63-68, an oligomeric duplex of any of embodiments 69-70, or an antisense agent of any of embodiments 71-73, and a pharmaceutically acceptable diluent or carrier.

[0200] Embodiment 75. The pharmaceutical composition of embodiment 74, wherein the pharmaceutically acceptable diluent is phosphate-buffered saline or artificial cerebrospinal fluid.

[0201] Embodiment 76. The pharmaceutical composition of embodiment 75, wherein the pharmaceutical composition consists essentially of the oligomeric compound, the population, the oligomeric duplex, or the antisense agent, and phosphate-buffered saline or artificial cerebrospinal fluid.

[0202] Embodiment 77. A method comprising administering to a subject an oligomeric compound of any of embodiments 1-62, a population of any of embodiments 63-68, an oligomeric duplex of any of embodiments 69-70, an antisense agent of any of embodiments 71-73, or a pharmaceutical composition of any of embodiments 74-76.

[0203] Embodiment 78. A method of treating a disease associated with DMPK, comprising administering to a subject having a disease associated with DMPK a therapeutically effective amount of an oligomeric compound of any of embodiments 1-62, a population of any of embodiments 63-68, an oligomeric duplex of any of embodiments 69-70, an antisense agent of any of embodiments 71-73, or a pharmaceutical composition of any of embodiments 74-76; thereby treating the disease associated with DMPK.

[0204] Embodiment 79. The method of embodiment 78, wherein the disease associated with DMPK is type 1 myotonic dystrophy.

[0205] Embodiment 80. The method of any of embodiments 77-79, wherein administering the oligomeric compound of any of embodiments 1-62, population of any of embodiments 63-68, oligomeric duplex of any of embodiments 69-70, antisense agent of any of embodiments 71-73, or a pharmaceutical composition of any of embodiments 74-76 reduces one or more of muscle stiffness, myotonia, disabling distal weakness, weakness in face and jaw muscles, difficulty in swallowing, drooping of the eyelids (ptosis), weakness of neck muscles, weakness in arm and leg muscles, persistent muscle pain, hypersomnia, muscle wasting, dysphagia, respiratory insufficiency, irregular heartbeat, heart muscle damage, apathy, insulin resistance, and cataracts.

[0206] Embodiment 81. The method of any of embodiments 78-80, wherein the subject is human.

[0207] Embodiment 82. A method of reducing expression of DMPK in a cell comprising contacting the cell with an oligomeric compound of any of embodiments 1-62, a population of any of embodiments 63-68, an oligomeric duplex of any of embodiments 69-70, an antisense agent of any of embodiments 71-73, or a pharmaceutical composition of any of embodiments 74-76.

[0208] Embodiment 83. The method of embodiment 82, wherein the cell is a muscle cell or a neuron.

[0209] Embodiment 84. The method of embodiment 82 or embodiment 83, wherein the cell is a human cell.

[0210] Embodiment 85. Use of an oligomeric compound of any of embodiments 1-62, a population of any of embodiments 63-68, an oligomeric duplex of any of embodiments 69-70, an antisense agent of any of embodiments 71-73, or a pharmaceutical composition of any of embodiments 74-76 for treating a disease associated with DMPK.

[0211] Embodiment 86. Use of an oligomeric compound of any of embodiments 1-62, a population of any of embodiments 63-68, an oligomeric duplex of any of embodiments 69-70, an antisense agent of any of embodiments 71-73, or a pharmaceutical composition of any of embodiments 74-76 in the manufacture of a medicament for treating a disease associated with DMPK.

[0212] Embodiment 87. The use of embodiment 85 or embodiment 86, wherein the disease associated with DMPK is type 1 myotonic dystrophy.

### I. Certain Oligonucleotides

[0213] In certain embodiments, provided herein are oligomeric compounds comprising oligonucleotides, which consist of linked nucleosides. Oligonucleotides may be unmodified oligonucleotides (RNA or DNA) or may be modified oligonucleotides. Modified oligonucleotides comprise at least one modification relative to unmodified RNA or DNA. That is, modified oligonucleotides comprise at least one modified nucleoside (comprising a modified sugar moiety and/or a modified nucleobase) and/or at least one modified internucleoside linkage.

### A. Certain Modified Nucleosides

[0214] Modified nucleosides comprise a modified sugar moiety or a modified nucleobase or both a modified sugar moiety and a modified nucleobase. In certain embodiments, modified nucleosides comprising the following modified sugar moieties and/or the following modified nucleobases are incorporated into modified oligonucleotides.

### 1. Certain Sugar Moieties

[0215] In certain embodiments, modified sugar moieties are non-bicyclic modified sugar moieties comprising a furanosyl ring with one or more substituent groups none of which bridges two atoms of the furanosyl ring to form a bicyclic structure. Such non-bridging substituents may be at any position of the furanosyl, including but not limited to substituents at the 2′, 3′, 4′, and/or 5′ positions. Examples of 2′-substituent groups suitable for non-bicyclic modified sugar moieties include but are not limited to 2′-O(CH₂)₂OCH₃ (“MOE” or “O-methoxyethyl”).

[0216] In certain embodiments, modified furanosyl sugar moieties and nucleosides incorporating such modified furanosyl sugar moieties are further defined by isomeric configuration. For example, a 2′-deoxyfuranosyl sugar moiety may be in seven isomeric configurations other than the naturally occurring β-D-deoxyribosyl configuration. Such modified sugar moieties are described in, e.g., WO 2019/157531, incorporated by reference herein. A 2′-modified sugar moiety has an additional stereocenter at the 2′-position relative to a 2′-deoxyfuranosyl sugar moiety; therefore, such sugar moieties have a total of sixteen possible isomeric configurations. 2′-modified sugar moieties described herein are in the β-D-ribosyl isomeric configuration unless otherwise specified.

[0217] Certain modified sugar moieties comprise a substituent that bridges two atoms of the furanosyl ring to form a second ring, resulting in a bicyclic sugar moiety. In certain such embodiments, the bicyclic sugar moiety comprises a bridge between the 4′ and the 2′ furanose ring atoms. Examples of such 4′ to 2′ bridging sugar substituents include but are not limited to: 4′-CH2-2′, 4′-(CH2)2-2′, 4′-(CH2)3-2′, 4′-CH2-O-2′ (“LNA”), 4′-CH2-S-2′, 4′-(CH2)2-O-2′ (“ENA”), 4′-CH(CH3)—O-2′ (referred to as “constrained ethyl” or “cEt”), 4′-CH2-O—CH2-2′, 4′-CH2-N(R)-2′, 4′-C—H(CH2OCH3)—O-2′ (“constrained MOE” or “cMOE”) and analogs thereof (see, e.g., Seth et al., U.S. Pat. No. 7,399,845, Bhat et al., U.S. Pat. No. 7,569,686, Swayze et al., U.S. Pat. No. 7,741,457, and Swayze et al., U.S. Pat. No. 8,022,193), 4′-C(CH3)(CH3)—O-2′ and analogs thereof (see, e.g., Seth et al., U.S. Pat. No. 8,278,283), 4′-CH2-N(OCH3)-2′ and analogs thereof (see, e.g., Prakash et al., U.S. Pat. No. 8,278,425), 4′-CH2-O—N(CH3)-2′ (see, e.g., Allerson et al., U.S. Pat. No. 7,696,345 and Allerson et al., U.S. Pat. No. 8,124,745), 4′-CH2-C—(H)(CH3)-2′ (see, e.g., Zhou, et al., J. Org. Chem., 2009, 74, 118-134), 4′-CH2-C—(═CH2)-2′ and analogs thereof (see e.g., Seth et al., U.S. Pat. No. 8,278,426), 4′ C(RaRb)—N(R)—O-2′, 4′-C(RaRb)—O—N(R)-2′, 4′-CH2-O—N(R)-2′, and 4′-CH2-N(R)—O-2′, wherein each R, Ra, and Rb is, independently, H, a protecting group, or C₁-C₁₂ alkyl (see, e.g. Imanishi et al., U.S. Pat. No. 7,427,672).

### 2. Certain Modified Nucleobases

[0218] In certain embodiments, modified oligonucleotides comprise one or more nucleosides comprising an unmodified nucleobase. In certain embodiments, modified oligonucleotides comprise one or more nucleosides comprising a modified nucleobase. Examples of modified nucleobases include 5-methylcytosine.

[0219] Publications that teach the preparation of certain modified nucleobases include without limitation, Manoharan et al., US2003/0158403; Manoharan et al., US2003/0175906; Dinh et al., U.S. Pat. No. 4,845,205; Spielvogel et al., U.S. Pat. No. 5,130,302; Rogers et al., U.S. Pat. No. 5,134,066; Bischofberger et al., U.S. Pat. No. 5,175,273; Urdea et al., U.S. Pat. No. 5,367,066; Benner et al., U.S. Pat. No. 5,432,272; Matteucci et al., U.S. Pat. No. 5,434,257; Gmeiner et al., U.S. Pat. No. 5,457,187; Cook et al., U.S. Pat. No. 5,459,255; Froehler et al., U.S. Pat. No. 5,484,908; Matteucci et al., U.S. Pat. No. 5,502,177; Hawkins et al., U.S. Pat. No. 5,525,711; Haralambidis et al., U.S. Pat. No. 5,552,540; Cook et al., U.S. Pat. No. 5,587,469; Froehler et al., U.S. Pat. No. 5,594,121; Switzer et al., U.S. Pat. No. 5,596,091; Cook et al., U.S. Pat. No. 5,614,617; Froehler et al., U.S. Pat. No. 5,645,985; Cook et al., U.S. Pat. No. 5,681,941; Cook et al., U.S. Pat. No. 5,811,534; Cook et al., U.S. Pat. No. 5,750,692; Cook et al., U.S. Pat. No. 5,948,903; Cook et al., U.S. Pat. No. 5,587,470; Cook et al., U.S. Pat. No. 5,457,191; Matteucci et al., U.S. Pat. No. 5,763,588; Froehler et al., U.S. Pat. No. 5,830,653; Cook et al., U.S. Pat. No. 5,808,027; Cook et al., U.S. Pat. No. 6,166,199; and Matteucci et al., U.S. Pat. No. 6,005,096.

### 3. Certain Modified Internucleoside Linkages

[0220] The naturally occurring internucleoside linkage of RNA and DNA is a 3′ to 5′ phosphodiester linkage. In certain embodiments, nucleosides of modified oligonucleotides may be linked together using one or more modified internucleoside linkages. The two main classes of internucleoside linking groups are defined by the presence or absence of a phosphorus atom. Representative phosphorus-containing internucleoside linkages include but are not limited to phosphates, which contain a phosphodiester bond (“P═O”) (also referred to as unmodified or naturally occurring linkages), phosphotriesters, methylphosphonates, phosphoramidates, and phosphorothioates (“P═S”), and phosphorodithioates (“HS—P═S”). Representative non-phosphorus containing internucleoside linking groups include but are not limited to methylenemethylimino (—CH₂—N(CH₃)—O—CH₂—), thiodiester, thionocarbamate (—O—C(═O)(NH)—S—); siloxane (—O—SiH₂—O—); and N,N′-dimethylhydrazine (—CH₂—N(CH₃)—N(CH₃)—). Modified internucleoside linkages, compared to naturally occurring phosphate linkages, can be used to alter, typically increase, nuclease resistance of the oligonucleotide. In certain embodiments, internucleoside linkages having a chiral atom can be prepared as a racemic mixture, or as separate enantiomers. Methods of preparation of phosphorous-containing and non-phosphorous-containing internucleoside linkages are well known to those skilled in the art.

[0221] In certain embodiments, a modified internucleoside linkage is any of those described in WO/2021/030778, incorporated by reference herein. In certain embodiments, a modified internucleoside linkage comprises the formula:

[chemical structure]

wherein independently for each internucleoside linking group of the modified oligonucleotide:
[0222] X is selected from O or S;
[0223] R₁ is selected from H, C₁-C₆ alkyl, and substituted C₁-C₆ alkyl; and
[0224] T is selected from SO₂R₂, C(═O)R₃, and P(═O)R₄R₅, wherein:
[0225] R₂ is selected from an aryl, a substituted aryl, a heterocycle, a substituted heterocycle, an aromatic heterocycle, a substituted aromatic heterocycle, a diazole, a substituted diazole, a C₁-C₆ alkoxy, C₁-C₆ alkyl, C₁-C₆ alkenyl, C₁-C₆ alkynyl, substituted C₁-C₆ alkyl, substituted C₁-C₆ alkenyl substituted C₁-C₆ alkynyl, and a conjugate group;
[0226] R₃ is selected from an aryl, a substituted aryl, CH₃, N(CH₃)₂, OCH₃ and a conjugate group;
[0227] R₄ is selected from OCH₃, OH, C₁-C₆ alkyl, substituted C₁-C₆ alkyl and a conjugate group; and
[0228] R₅ is selected from OCH₃, OH, C₁-C₆ alkyl, and substituted C₁-C₆ alkyl.

[0229] In certain embodiments, a modified internucleoside linkage comprises a mesyl phosphoramidate linking group having a formula:

[chemical structure]

[0230] In certain embodiments, a mesyl phosphoramidate internucleoside linkage may comprise a chiral center. In certain embodiments, modified oligonucleotides comprising (Rp) and/or (Sp) mesyl phosphoramidates comprise one or more of the following formulas, respectively, wherein “B” indicates a nucleobase:

[chemical structure]

[0231] Representative internucleoside linkages having a chiral center include but are not limited to alkylphosphonates, mesyl phosphoramidates, and phosphorothioates. Modified oligonucleotides comprising internucleoside linkages having a chiral center can be prepared as populations of modified oligonucleotides comprising stereorandom internucleoside linkages, or as populations of modified oligonucleotides comprising phosphorothioate or other linkages containing chiral centers in particular stereochemical configurations. In certain embodiments, populations of modified oligonucleotides comprise phosphorothioate internucleoside linkages wherein all of the phosphorothioate internucleoside linkages are stereorandom. In certain embodiments, populations of modified oligonucleotides comprise mesyl phosphoramidate internucleoside linkages wherein all of the mesyl phosphoramidate internucleoside linkages are stereorandom. Such modified oligonucleotides can be generated using synthetic methods that result in random selection of the stereochemical configuration of each phosphorothioate or mesyl phosphoramidate linkage. Nonetheless, each individual phosphorothioate or mesyl phosphoramidate of each individual oligonucleotide molecule has a defined stereoconfiguration. In certain embodiments, populations of modified oligonucleotides are enriched for modified oligonucleotides comprising one or more particular phosphorothioate or mesyl phosphoramidate internucleoside linkages in a particular, independently selected stereochemical configuration. In certain embodiments, the particular configuration of the particular phosphorothioate or mesyl phosphoramidate linkage is present in at least 65% of the molecules in the population. In certain embodiments, the particular configuration of the particular phosphorothioate or mesyl phosphoramidate linkage is present in at least 70% of the molecules in the population. In certain embodiments, the particular configuration of the particular phosphorothioate or mesyl phosphoramidate linkage is present in at least 80% of the molecules in the population. In certain embodiments, the particular configuration of the particular phosphorothioate or mesyl phosphoramidate linkage is present in at least 90% of the molecules in the population. In certain embodiments, the particular configuration of the particular phosphorothioate or mesyl phosphoramidate linkage is present in at least 99% of the molecules in the population. Such chirally enriched populations of modified oligonucleotides can be generated using synthetic methods known in the art, e.g., methods described in Oka et al., JACS 125, 8307 (2003), Wan et al. Nuc. Acid. Res. 42, 13456 (2014), and WO 2017/015555. In certain embodiments, a population of modified oligonucleotides is enriched for modified oligonucleotides having at least one indicated phosphorothioate or mesyl phosphoramidate in the (Sp) configuration. In certain embodiments, a population of modified oligonucleotides is enriched for modified oligonucleotides having at least one phosphorothioate or mesyl phosphoramidate in the (Rp) configuration. In certain embodiments, modified oligonucleotides comprising (Rp) and/or (Sp) phosphorothioates comprise one or more of the following formulas, respectively, wherein “B” indicates a nucleobase:

[chemical structure]

Unless otherwise indicated, chiral internucleoside linkages of modified oligonucleotides described herein can be stereorandom or in a particular stereochemical configuration.

[0232] Neutral internucleoside linkages include, without limitation, phosphotriesters, methylphosphonates, MMI (3′-CH₂—N(CH₃)—O-5′), amide-3 (3′-CH₂—C(═O)—N(H)-5′), amide-4 (3′-CH₂—N(H)—C(═O)-5′), formacetal (3′-O—CH₂—O-5′), methoxypropyl (MOP), and thioformacetal (3′-S—CH₂—O-5′). Further neutral internucleoside linkages include nonionic linkages comprising siloxane (dialkylsiloxane), carboxylate ester, carboxamide, sulfide, sulfonate ester and amides (See for example: Carbohydrate Modifications in Antisense Research; Y. S. Sanghvi and P. D. Cook, Eds., ACS Symposium Series 580; Chapters 3 and 4, 40-65). Further neutral internucleoside linkages include nonionic linkages comprising mixed N, O, S and CH₂ component parts.

[0233] In certain embodiments, modified oligonucleotides comprise one or more inverted nucleoside, as shown below:

[chemical structure]

wherein each Bx independently represents any nucleobase.

[0234] In certain embodiments, an inverted nucleoside is terminal (i.e., the last nucleoside on one end of an oligonucleotide) and so only one internucleoside linkage depicted above will be present. In certain such embodiments, additional features (such as a conjugate group) may be attached to the inverted nucleoside. Such terminal inverted nucleosides can be attached to either or both ends of an oligonucleotide.

[0235] In certain embodiments, such groups lack a nucleobase and are referred to herein as inverted sugar moieties. In certain embodiments, an inverted sugar moiety is terminal (i.e., attached to the last nucleoside on one end of an oligonucleotide) and so only one internucleoside linkage above will be present. In certain such embodiments, additional features (such as a conjugate group) may be attached to the inverted sugar moiety. Such terminal inverted sugar moieties can be attached to either or both ends of an oligonucleotide.

[0236] In certain embodiments, nucleic acids can be linked 2′ to 5′ rather than the standard 3′ to 5′ linkage. Such a linkage is illustrated below.

[chemical structure]

wherein each Bx represents any nucleobase.

### B. Certain Motifs

[0237] In certain embodiments, modified oligonucleotides comprise one or more modified nucleosides comprising a modified sugar moiety. In certain embodiments, modified oligonucleotides comprise one or more modified nucleosides comprising a modified nucleobase. In certain embodiments, modified oligonucleotides comprise one or more modified internucleoside linkage. In such embodiments, the modified, unmodified, and differently modified sugar moieties, nucleobases, and/or internucleoside linkages of a modified oligonucleotide define a pattern or motif. In certain embodiments, the patterns of sugar moieties, nucleobases, and internucleoside linkages are each independent of one another. Thus, a modified oligonucleotide may be described by its sugar motif, nucleobase motif and/or internucleoside linkage motif (as used herein, nucleobase motif describes the modifications to the nucleobases independent of the sequence of nucleobases).

### 1. Certain Sugar Motifs

[0238] In certain embodiments, oligonucleotides comprise one or more type of modified sugar and/or unmodified sugar moiety arranged along the oligonucleotide or region thereof in a defined pattern or sugar motif. In certain instances, such sugar motifs include but are not limited to any of the sugar modifications discussed herein.

### Gapmer Oligonucleotides

[0239] In certain embodiments, modified oligonucleotides comprise or consist of a region having a gapmer motif, which is defined by two external regions or “wings” and a central or internal region or “gap.” The three regions of a gapmer motif (the 5′-wing, the gap, and the 3′-wing) form a contiguous sequence of nucleosides wherein at least some of the sugar moieties of the nucleosides of each of the wings differ from at least some of the sugar moieties of the nucleosides of the gap. Specifically, at least the sugar moieties of the nucleosides of each wing that are closest to the gap (the 3′-most nucleoside of the 5′-wing and the 5′-most nucleoside of the 3′-wing) differ from the sugar moiety of the neighboring gap nucleosides, thus defining the boundary between the wings and the gap (i.e., the wing/gap junction). In certain embodiments, the sugar moieties within the gap are the same as one another. In certain embodiments, the gap includes one or more nucleoside having a sugar moiety that differs from the sugar moiety of one or more other nucleosides of the gap. In certain embodiments, the sugar motifs of the two wings are the same as one another (symmetric gapmer). In certain embodiments, the sugar motif of the 5′-wing differs from the sugar motif of the 3′-wing (asymmetric gapmer).

[0240] In certain embodiments, the wings of a gapmer comprise 1-6 nucleosides. In certain embodiments, each nucleoside of each wing of a gapmer comprises a modified sugar moiety. In certain embodiments, at least one nucleoside of each wing of a gapmer comprises a modified sugar moiety. In certain embodiments, at least two nucleosides of each wing of a gapmer comprises a modified sugar moiety. In certain embodiments, at least three nucleosides of each wing of a gapmer comprises a modified sugar moiety. In certain embodiments, at least four nucleosides of each wing of a gapmer comprises a modified sugar moiety.

[0241] In certain embodiments, the gap of a gapmer comprises 7-12 nucleosides. In certain embodiments, each nucleoside of the gap of a gapmer comprises a 2′-β-D-deoxyribosyl sugar moiety. In certain embodiments, at least one nucleoside of the gap of a gapmer comprises a modified sugar moiety.

[0242] In certain embodiments, the gapmer is a deoxy gapmer. In certain embodiments, the nucleosides on the gap side of each wing/gap junction comprise 2′-deoxyribosyl sugar moieties and the nucleosides on the wing sides of each wing/gap junction comprise modified sugar moieties. In certain embodiments, each nucleoside of the gap comprises a 2′-β-D-deoxyribosyl sugar moiety. In certain embodiments, each nucleoside of each wing of a gapmer comprises a modified sugar moiety. In certain embodiments, at least one nucleoside of the gap of a gapmer comprises a modified sugar moiety. In certain embodiments, one nucleoside of the gap comprises a modified sugar moiety and each remaining nucleoside of the gap comprises a 2′-deoxyribosyl sugar moiety. In certain embodiments, at least one nucleoside of the gap of a gapmer comprises a 2′-OMe sugar moiety.

Herein, the lengths (number of nucleosides) of the three regions of a gapmer may be provided using the notation [# of nucleosides in the 5′-wing]−[# of nucleosides in the gap]−[# of nucleosides in the 3′-wing]. Thus, a 3-10-3 gapmer consists of 3 linked nucleosides in each wing and 10 linked nucleosides in the gap. Where such nomenclature is followed by a specific modification, that modification is the modification in each sugar moiety of each wing and the gap nucleosides comprise 2′-β-D-deoxyribosyl sugar moieties. Thus, a 5-10-5 MOE gapmer consists of 5 linked 2′-MOE nucleosides in the 5′-wing, 10 linked 2′-β-D-deoxynucleosides in the gap, and 5 linked 2′-MOE nucleosides in the 3′-wing. A 6-10-4 MOE gapmer consists of 6 linked 2′-MOE nucleosides in the 5′-wing, 10 linked 2′-β-D-deoxynucleosides in the gap, and 4 linked 2′-MOE nucleosides in the 3′-wing. A 3-10-3 cEt gapmer consists of 3 linked cEt nucleosides in the 5′-wing, 10 linked 2′-β-D-deoxynucleosides in the gap, and 3 linked cEt nucleosides in the 3′-wing. In certain embodiments, modified oligonucleotides are 5-10-5 MOE gapmers. In certain embodiments, modified oligonucleotides are 6-10-4 MOE gapmers. In certain embodiments, modified oligonucleotides are 5-10-5 cEt gapmers.

[0243] In certain embodiments, the modified oligonucleotide has a sugar motif (5′ to 3′) selected from: eeeeeddddddddddeeeee, kkkddddddddddkkk, eekkddddddddkkee, eeeeddddddddddeeeeee, eeeeddddddddeeeeee, eeeeeddddddddeeeee, eeeeeeddddddddddeeee, eeeeeeddddddddeeee, kkkedddddddddkkk, kkkdyddddddddkkk, kkeddddddddddkkk, kekddddddddddkkk, ekkddddddddddkke, kkddddddddddkk, ekkkddddddddkkke, ekkddddddddddkkk, kkkddddddddddkke, kkkdd[5′-(S)-Me-d]dddddddkkk, kkkdd[5′-(R)-Me-d]dddddddkkk, kkkdd[5′-(R)-allyl-d]dddddddkkk, kkkddd[5′-(R)-Me-d]ddddddkkk, wherein each “d” represents a 2′-β-D-deoxyribosyl sugar moiety, each “e” represents a 2′-MOE sugar moiety, each “y” represents a 2′-OMe sugar moiety, each “[5′-(S)-Me-d]” represents a 5′-(S)-methyl-β-D-2′-deoxyribosyl sugar moiety, each “[5′-(R)-Me-d]” represents a 5′-(R)-methyl-β-D-2′-deoxyribosyl sugar moiety, and each “[5′-(R)-allyl-d]” represents a 5′-(R)-allyl-β-D-2′-deoxyribosyl sugar moiety, and each “k” represents a cEt sugar moiety.

[0244] In certain embodiments, modified oligonucleotides have a sugar motif selected from 5′ to 3′: eeeeeddddddddddeeeee; wherein each “d” represents a 2′-β-D-deoxyribosyl sugar moiety, and each “e” represents a 2′-MOE sugar moiety.

[0245] In certain embodiments, modified oligonucleotides have a sugar motif selected from 5′ to 3′: eeeeeeddddddddddeeee; wherein each “d” represents a 2′-β-D-deoxyribosyl sugar moiety, and each “e” represents a 2′-MOE sugar moiety.

[0246] In certain embodiments, modified oligonucleotides have the sugar motif from 5′ to 3′: kkkddddddddddkkk; wherein each “d” represents a 2′-β-D-deoxyribosyl sugar moiety, and each “k” represents a cEt sugar moiety.

### 2. Certain Nucleobase Motifs

[0247] In certain embodiments, oligonucleotides comprise modified and/or unmodified nucleobases arranged along the oligonucleotide or region thereof in a defined pattern or motif. In certain embodiments, each nucleobase is modified. In certain embodiments, none of the nucleobases are modified. In certain embodiments, each purine or each pyrimidine is modified. In certain embodiments, each cytosine is modified. In certain embodiments, some or all of the cytosine nucleobases in a modified oligonucleotide are 5-methylcytosines. In certain embodiments, all of the cytosine nucleobases are 5-methylcytosines and all of the other nucleobases of the modified oligonucleotide are unmodified nucleobases.

[0248] In certain embodiments, oligonucleotides having a gapmer motif comprise a nucleoside comprising a modified nucleobase. In certain such embodiments, one nucleoside comprising a modified nucleobase is in the central gap of an oligonucleotide having a gapmer motif. In certain such embodiments, the sugar moiety of said nucleoside is a 2′-deoxyribosyl sugar moiety.

### 3. Certain Internucleoside Linkage Motifs

[0249] In certain embodiments, oligonucleotides comprise modified and/or unmodified internucleoside linkages arranged along the oligonucleotide or region thereof in a defined pattern or motif. In certain embodiments, each internucleoside linking group is a phosphodiester internucleoside linkage (P═O). In certain embodiments, each internucleoside linking group of a modified oligonucleotide is a phosphorothioate internucleoside linkage (P═S). In certain embodiments, each internucleoside linkage of a modified oligonucleotide is independently selected from a phosphorothioate internucleoside linkage and phosphodiester internucleoside linkage. In certain embodiments, each phosphorothioate internucleoside linkage is independently selected from a stereorandom phosphorothioate, a (Sp) phosphorothioate, and a (Rp) phosphorothioate.

[0250] In certain embodiments, the sugar motif of a modified oligonucleotide is a gapmer and the internucleoside linkages within the gap are all modified. In certain such embodiments, some, or all of the internucleoside linkages in the wings are unmodified phosphodiester internucleoside linkages. In certain embodiments, the terminal internucleoside linkages are modified. In certain embodiments, the sugar motif of a modified oligonucleotide is a gapmer, and the internucleoside linkage motif comprises at least one phosphodiester internucleoside linkage in at least one wing, wherein the at least one phosphodiester linkage is not a terminal internucleoside linkage, and the remaining internucleoside linkages are phosphorothioate internucleoside linkages. In certain such embodiments, all of the phosphorothioate linkages are stereorandom. In certain embodiments, all of the phosphorothioate linkages in the wings are (Sp) phosphorothioates, and the gap comprises at least one Sp, Sp, Rp motif. In certain embodiments, populations of modified oligonucleotides are enriched for modified oligonucleotides comprising such internucleoside linkage motifs.

[0251] In certain embodiments, the internucleoside linkage motif of the modified oligonucleotide is selected from soooossssssssssooss, sssssssssssssss, sooossssssssssoooss, soosssssssssoooss, sooosssssssssooss, sooooossssssssssoss, soooosssssssssoss, ssssxssssssssss, sssssssssssss, soossssssssssos, sosssssssssssos, soosxssssssssos, ooooxoooooooooo, sssssxsssssssss, soossxsssssssos, wherein each “s” represents a phosphorothioate internucleoside linkage, each “o” represents a phosphodiester internucleoside linkage, and each “x” represents a methoxypropyl phosphonate internucleoside linkage. In certain embodiments, modified oligonucleotides have an internucleoside linkage motif of (5′ to 3′): sooosssssssssssooss phosphorothioate internucleoside linkage. In certain embodiments, modified oligonucleotides have an internucleoside linkage motif of (5′ to 3′): sooooossssssssssoss, wherein each “s” represents a phosphorothioate internucleoside linkage and each “o” represents a phosphodiester internucleoside linkage.

### C. Certain Lengths

[0252] It is possible to increase or decrease the length of an oligonucleotide without eliminating activity. For example, in Woolf et al., Proc. Natl. Acad. Sci. USA, 1992, 89, 7305-7309, 1992), a series of oligonucleotides 13-25 nucleobases in length were tested for their ability to induce cleavage of a target nucleic acid in an oocyte injection model. Oligonucleotides 25 nucleobases in length with 8 or 11 mismatch bases near the ends of the oligonucleotides were able to direct specific cleavage of the target nucleic acid, albeit to a lesser extent than the oligonucleotides that contained no mismatches. Similarly, target specific cleavage was achieved using 13 nucleobase oligonucleotides, including those with 1 or 3 mismatches.

[0253] In certain embodiments, oligonucleotides (including modified oligonucleotides) can have any of a variety of ranges of lengths. In certain embodiments, oligonucleotides consist of X to Y linked nucleosides, where X represents the fewest number of nucleosides in the range and Y represents the largest number nucleosides in the range. In certain such embodiments, X and Y are each independently selected from 8, 9, 10, 11, 12, 13, 14, 15, 16, 17, 18, 19, 20, 21, 22, 23, 24, 25, 26, 27, 28, 29, 30, 31, 32, 33, 34, 35, 36, 37, 38, 39, 40, 41, 42, 43, 44, 45, 46, 47, 48, 49, and 50; provided that X≤Y. For example, in certain embodiments, oligonucleotides consist of 12 to 13, 12 to 14, 12 to 15, 12 to 16, 12 to 17, 12 to 18, 12 to 19, 12 to 20, 12 to 21, 12 to 22, 12 to 23, 12 to 24, 12 to 25, 12 to 26, 12 to 27, 12 to 28, 12 to 29, 12 to 30, 13 to 14, 13 to 15, 13 to 16, 13 to 17, 13 to 18, 13 to 19, 13 to 20, 13 to 21, 13 to 22, 13 to 23, 13 to 24, 13 to 25, 13 to 26, 13 to 27, 13 to 28, 13 to 29, 13 to 30, 14 to 15, 14 to 16, 14 to 17, 14 to 18, 14 to 19, 14 to 20, 14 to 21, 14 to 22, 14 to 23, 14 to 24, 14 to 25, 14 to 26, 14 to 27, 14 to 28, 14 to 29, 14 to 30, 15 to 16, 15 to 17, 15 to 18, 15 to 19, 15 to 20, 15 to 21, 15 to 22, 15 to 23, 15 to 24, 15 to 25, 15 to 26, 15 to 27, 15 to 28, 15 to 29, 15 to 30, 16 to 17, 16 to 18, 16 to 19, 16 to 20, 16 to 21, 16 to 22, 16 to 23, 16 to 24, 16 to 25, 16 to 26, 16 to 27, 16 to 28, 16 to 29, 16 to 30, 17 to 18, 17 to 19, 17 to 20, 17 to 21, 17 to 22, 17 to 23, 17 to 24, 17 to 25, 17 to 26, 17 to 27, 17 to 28, 17 to 29, 17 to 30, 18 to 19, 18 to 20, 18 to 21, 18 to 22, 18 to 23, 18 to 24, 18 to 25, 18 to 26, 18 to 27, 18 to 28, 18 to 29, 18 to 30, 19 to 20, 19 to 21, 19 to 22, 19 to 23, 19 to 24, 19 to 25, 19 to 26, 19 to 27, 19 to 28, 19 to 29, 19 to 30, 20 to 21, 20 to 22, 20 to 23, 20 to 24, 20 to 25, 20 to 26, 20 to 27, 20 to 28, 20 to 29, 20 to 30, 21 to 22, 21 to 23, 21 to 24, 21 to 25, 21 to 26, 21 to 27, 21 to 28, 21 to 29, 21 to 30, 22 to 23, 22 to 24, 22 to 25, 22 to 26, 22 to 27, 22 to 28, 22 to 29, 22 to 30, 23 to 24, 23 to 25, 23 to 26, 23 to 27, 23 to 28, 23 to 29, 23 to 30, 24 to 25, 24 to 26, 24 to 27, 24 to 28, 24 to 29, 24 to 30, 25 to 26, 25 to 27, 25 to 28, 25 to 29, 25 to 30, 26 to 27, 26 to 28, 26 to 29, 26 to 30, 27 to 28, 27 to 29, 27 to 30, 28 to 29, 28 to 30, or 29 to 30 linked nucleosides.

[0254] In certain embodiments, oligonucleotides consist of 16 linked nucleosides. In certain embodiments, oligonucleotides consist of 17 linked nucleosides. In certain embodiments, oligonucleotides consist of 18 linked nucleosides. In certain embodiments, oligonucleotides consist of 19 linked nucleosides. In certain embodiments, oligonucleotides consist of 20 linked nucleosides.

### D. Certain Modified Oligonucleotides

[0255] In certain embodiments, the above modifications (sugar, nucleobase, internucleoside linkage) are incorporated into a modified oligonucleotide. In certain embodiments, modified oligonucleotides are characterized by their modification motifs and overall lengths. In certain embodiments, such parameters are each independent of one another. Thus, unless otherwise indicated, each internucleoside linkage of an oligonucleotide having a gapmer sugar motif may be modified or unmodified and may or may not follow the gapmer modification pattern of the sugar modifications. For example, the internucleoside linkages within the wing regions of a sugar gapmer may be the same or different from one another and may be the same or different from the internucleoside linkages of the gap region of the sugar motif. Likewise, such sugar gapmer oligonucleotides may comprise one or more modified nucleobase independent of the gapmer pattern of the sugar modifications. Unless otherwise indicated, all modifications are independent of nucleobase sequence.

### E. Certain Populations of Modified Oligonucleotides

[0256] Populations of modified oligonucleotides in which all of the modified oligonucleotides of the population have the same molecular formula can be stereorandom populations or chirally enriched populations. All of the chiral centers of all of the modified oligonucleotides are stereorandom in a stereorandom population. In a chirally enriched population, at least one particular chiral center is not stereorandom in the modified oligonucleotides of the population. In certain embodiments, the modified oligonucleotides of a chirally enriched population are enriched for β-D ribosyl sugar moieties, and all of the phosphorothioate internucleoside linkages are stereorandom. In certain embodiments, the modified oligonucleotides of a chirally enriched population are enriched for both β-D ribosyl sugar moieties and at least one, particular phosphorothioate internucleoside linkage in a particular stereochemical configuration.

### F. Nucleobase Sequence

[0257] In certain embodiments, oligonucleotides (unmodified or modified oligonucleotides) are further described by their nucleobase sequence. In certain embodiments oligonucleotides have a nucleobase sequence that is complementary to a second oligonucleotide or an identified reference nucleic acid, such as a target nucleic acid. In certain such embodiments, a portion of an oligonucleotide has a nucleobase sequence that is complementary to a second oligonucleotide or an identified reference nucleic acid, such as a target nucleic acid. In certain embodiments, the nucleobase sequence of a portion or entire length of an oligonucleotide is at least 50%, at least 60%, at least 70%, at least 80%, at least 85%, at least 90%, at least 95%, or 100% complementary to the second oligonucleotide or nucleic acid, such as a target nucleic acid.

### II. Certain Oligomeric Compounds

[0258] In certain embodiments, provided herein are oligomeric compounds, which consist of an oligonucleotide (modified or unmodified) and optionally one or more conjugate groups and/or terminal groups. Conjugate groups consist of one or more conjugate moiety and a conjugate linker which links the conjugate moiety to the oligonucleotide. Conjugate groups may be attached to either or both ends of an oligonucleotide and/or at any internal position. In certain embodiments, conjugate groups are attached to the 2′-position of a nucleoside of a modified oligonucleotide. In certain embodiments, conjugate groups that are attached to either or both ends of an oligonucleotide are terminal groups. In certain such embodiments, conjugate groups or terminal groups are attached at the 3′ and/or 5′-end of oligonucleotides. In certain such embodiments, conjugate groups (or terminal groups) are attached at the 3′-end of oligonucleotides. In certain embodiments, conjugate groups are attached near the 3′-end of oligonucleotides. In certain embodiments, conjugate groups (or terminal groups) are attached at the 5′-end of oligonucleotides. In certain embodiments, conjugate groups are attached near the 5′-end of oligonucleotides.

[0259] Examples of terminal groups include but are not limited to conjugate groups, capping groups, phosphate moieties, protecting groups, modified or unmodified nucleosides, and two or more nucleosides that are independently modified or unmodified.

### A. Certain Conjugate Groups

[0260] In certain embodiments, oligonucleotides are covalently attached to one or more conjugate groups. In certain embodiments, conjugate groups modify one or more properties of the attached oligonucleotide, including but not limited to pharmacodynamics, pharmacokinetics, stability, binding, absorption, tissue distribution, cellular distribution, cellular uptake, charge and clearance.

[0261] In certain embodiments, conjugation of one or more carbohydrate moieties to a modified oligonucleotide can optimize one or more properties of the modified oligonucleotide. In certain embodiments, the carbohydrate moiety is attached to a modified subunit of the modified oligonucleotide. For example, the ribose sugar of one or more ribonucleotide subunits of a modified oligonucleotide can be replaced with another moiety, e.g. a non-carbohydrate (preferably cyclic) carrier to which is attached a carbohydrate ligand. A ribonucleotide subunit in which the ribose sugar of the subunit has been so replaced is referred to herein as a ribose replacement modification subunit (RRMS), which is a modified sugar moiety. A cyclic carrier may be a carbocyclic ring system, i.e., one or more ring atoms may be a heteroatom, e.g., nitrogen, oxygen, sulphur. The cyclic carrier may be a monocyclic ring system, or may contain two or more rings, e.g. fused rings. The cyclic carrier may be a fully saturated ring system, or it may contain one or more double bonds. In certain embodiments, the modified oligonucleotide is a gapmer.

[0262] In certain embodiments, conjugate groups impart a new property on the attached oligonucleotide, e.g., fluorophores or reporter groups that enable detection of the oligonucleotide. Certain conjugate groups and conjugate moieties have been described previously, for example: cholesterol moiety (Letsinger et al., Proc. Natl. Acad. Sci. USA, 1989, 86, 6553-6556), cholic acid (Manoharan et al., Bioorg. Med. Chem. Lett., 1994, 4, 1053-1060), a thioether, e.g., hexyl-S-tritylthiol (Manoharan et al., Ann. N. Y. Acad. Sci., 1992, 660, 306-309; Manoharan et al., Bioorg. Med. Chem. Lett., 1993, 3, 2765-2770), a thiocholesterol (Oberhauser et al., Nucl. Acids Res., 1992, 20, 533-538), an aliphatic chain, e.g., do-decan-diol or undecyl residues (Saison-Behmoaras et al., EMBO J., 1991, 10, 1111-1118; Kabanov et al., FEBS Lett., 1990, 259, 327-330; Svinarchuk et al., Biochimie, 1993, 75, 49-54), a phospholipid, e.g., di-hexadecyl-rac-glycerol or triethyl-ammonium 1,2-di-O-hexadecyl-rac-glycero-3-H-phosphonate (Manoharan et al., Tetrahedron Lett., 1995, 36, 3651-3654; Shea et al., Nucl. Acids Res., 1990, 18, 3777-3783), a polyamine or a polyethylene glycol chain (Manoharan et al., Nucleosides & Nucleotides, 1995, 14, 969-973), or adamantane acetic acid a palmityl moiety (Mishra et al., Biochim. Biophys. Acta, 1995, 1264, 229-237), an octadecylamine or hexylamino-carbonyl-oxycholesterol moiety (Crooke et al., J. Pharmacol. Exp. Ther., 1996, 277, 923-937), a tocopherol group (Nishina et al., Molecular Therapy Nucleic Acids, 2015, 4, e220; and Nishina et al., Molecular Therapy, 2008, 16, 734-740), or a GalNAc cluster (e.g., WO2014/179620).

[0263] In certain embodiments, the conjugate group may comprise a conjugate moiety selected from any of a C22 alkyl, C20 alkyl, C16 alkyl, C10 alkyl, C21 alkyl, C19 alkyl, C18 alkyl, C15 alkyl, C14 alkyl, C13 alkyl, C12 alkyl, C11 alkyl, C9 alkyl, C8 alkyl, C7 alkyl, C6 alkyl, C5 alkyl, C22 alkenyl, C20 alkenyl, C16 alkenyl, C10 alkenyl, C21 alkenyl, C19 alkenyl, C18 alkenyl, C15 alkenyl, C14 alkenyl, C13 alkenyl, C12 alkenyl, C11 alkenyl, C9 alkenyl, C8 alkenyl, C7 alkenyl, C6 alkenyl, or C5 alkenyl.

[0264] In certain embodiments, the conjugate group may comprise a conjugate moiety selected from any of a C22 alkyl, C20 alkyl, C16 alkyl, C10 alkyl, C21 alkyl, C19 alkyl, C18 alkyl, C15 alkyl, C14 alkyl, C13 alkyl, C12 alkyl, C11 alkyl, C9 alkyl, C8 alkyl, C7 alkyl, C6 alkyl, or C5 alkyl, where the alkyl chain has one or more unsaturated bonds.

[0265] In certain embodiments, a conjugate group is a lipid having the following structure:

[chemical structure]

### 1. Conjugate Moieties

[0266] Conjugate moieties include, without limitation, intercalators, reporter molecules, polyamines, polyamides, peptides, carbohydrates (e.g., GalNAc), vitamin moieties, polyethylene glycols, thioethers, polyethers, cholesterols, thiocholesterols, cholic acid moieties, folate, lipids, phospholipids, biotin, phenazine, phenanthridine, anthraquinone, adamantane, acridine, fluoresceins, rhodamines, coumarins, fluorophores, and dyes.

[0267] In certain embodiments, a conjugate moiety comprises an active drug substance, for example, aspirin, warfarin, phenylbutazone, ibuprofen, suprofen, fen-bufen, ketoprofen, (S)-(+)-pranoprofen, carprofen, dansylsarcosine, 2,3,5-triiodobenzoic acid, fingolimod, flufenamic acid, folinic acid, a benzothiadiazide, chlorothiazide, a diazepine, indo-methicin, a barbiturate, a cephalosporin, a sulfa drug, an antidiabetic, an antibacterial or an antibiotic.

### 2. Coniugate Linkers

[0268] Conjugate moieties are attached to oligonucleotides through conjugate linkers. In certain oligomeric compounds, the conjugate linker is a single chemical bond (i.e., the conjugate moiety is attached directly to an oligonucleotide through a single bond). In certain embodiments, the conjugate linker comprises a chain structure, such as a hydrocarbyl chain, or an oligomer of repeating units such as ethylene glycol, nucleosides, or amino acid units.

[0269] In certain embodiments, a conjugate linker comprises pyrrolidine.

[0270] In certain embodiments, a conjugate linker comprises one or more groups selected from alkyl, amino, oxo, amide, disulfide, polyethylene glycol, ether, thioether, and hydroxylamino. In certain such embodiments, the conjugate linker comprises groups selected from alkyl, amino, oxo, amide and ether groups. In certain embodiments, the conjugate linker comprises groups selected from alkyl and amide groups. In certain embodiments, the conjugate linker comprises groups selected from alkyl and ether groups. In certain embodiments, the conjugate linker comprises at least one phosphorus moiety. In certain embodiments, the conjugate linker comprises at least one phosphate group. In certain embodiments, the conjugate linker includes at least one neutral linking group.

[0271] In certain embodiments, conjugate linkers, including the conjugate linkers described above, are bifunctional linking moieties, e.g., those known in the art to be useful for attaching conjugate moieties to compounds, such as the oligonucleotides provided herein. In general, a bifunctional linking moiety comprises at least two functional groups. One of the functional groups is selected to react with a particular site on a compound and the other is selected to react with a conjugate moiety. Examples of functional groups used in a bifunctional linking moiety include but are not limited to electrophiles for reacting with nucleophilic groups and nucleophiles for reacting with electrophilic groups. In certain embodiments, bifunctional linking moieties comprise one or more groups selected from amino, hydroxyl, carboxylic acid, thiol, alkyl, alkenyl, and alkynyl.

[0272] Examples of conjugate linkers include but are not limited to pyrrolidine, 8-amino-3,6-dioxaoctanoic acid (ADO), succinimidyl 4-(N-maleimidomethyl) cyclohexane-1-carboxylate (SMCC) and 6-aminohexanoic acid (AHEX or AHA). Other conjugate linkers include but are not limited to substituted or unsubstituted C₁-C₁₀ alkyl, substituted or unsubstituted C₂-C₁₀ alkenyl or substituted or unsubstituted C₂-C₁₀ alkynyl, wherein a nonlimiting list of preferred substituent groups includes hydroxyl, amino, alkoxy, carboxy, benzyl, phenyl, nitro, thiol, thioalkoxy, halogen, alkyl, aryl, alkenyl and alkynyl.

[0273] In certain embodiments, conjugate linkers comprise 1-10 linker-nucleosides. In certain embodiments, conjugate linkers comprise 2-5 linker-nucleosides. In certain embodiments, conjugate linkers comprise exactly 3 linker-nucleosides. In certain embodiments, conjugate linkers comprise the TCA motif. In certain embodiments, such linker-nucleosides are modified nucleosides. In certain embodiments such linker-nucleosides comprise a modified sugar moiety. In certain embodiments, linker-nucleosides are unmodified. In certain embodiments, linker-nucleosides comprise an optionally protected heterocyclic base selected from a purine, substituted purine, pyrimidine or substituted pyrimidine. In certain embodiments, a cleavable moiety is a nucleoside selected from uracil, thymine, cytosine, 4-N-benzoylcytosine, 5-methylcytosine, 4-N-benzoyl-5-methylcytosine, adenine, 6-N-benzoyladenine, guanine and 2-N-isobutyrylguanine. It is typically desirable for linker-nucleosides to be cleaved from the oligomeric compound after it reaches a target tissue. Accordingly, linker-nucleosides are typically linked to one another and to the remainder of the oligomeric compound through cleavable bonds. In certain embodiments, such cleavable bonds are phosphodiester bonds.

[0274] Herein, linker-nucleosides are not considered to be part of the oligonucleotide. Accordingly, in embodiments in which an oligomeric compound comprises an oligonucleotide consisting of a specified number or range of linked nucleosides and/or a specified percent complementarity to a reference nucleic acid and the oligomeric compound also comprises a conjugate group comprising a conjugate linker comprising linker-nucleosides, those linker-nucleosides are not counted toward the length of the oligonucleotide and are not used in determining the percent complementarity of the oligonucleotide for the reference nucleic acid. For example, an oligomeric compound may comprise (1) a modified oligonucleotide consisting of 8-30 nucleosides and (2) a conjugate group comprising 1-10 linker-nucleosides that are contiguous with the nucleosides of the modified oligonucleotide. The total number of contiguous linked nucleosides in such an oligomeric compound is more than 30. Alternatively, an oligomeric compound may comprise a modified oligonucleotide consisting of 8-30 nucleosides and no conjugate group. The total number of contiguous linked nucleosides in such an oligomeric compound is no more than 30. Unless otherwise indicated conjugate linkers comprise no more than 10 linker-nucleosides. In certain embodiments, conjugate linkers comprise no more than 5 linker-nucleosides. In certain embodiments, conjugate linkers comprise no more than 3 linker-nucleosides. In certain embodiments, conjugate linkers comprise no more than 2 linker-nucleosides. In certain embodiments, conjugate linkers comprise no more than 1 linker-nucleoside.

[0275] In certain embodiments, it is desirable for a conjugate group to be cleaved from the oligonucleotide. For example, in certain circumstances oligomeric compounds comprising a particular conjugate moiety are better taken up by a particular cell type, but once the oligomeric compound has been taken up, it is desirable that the conjugate group be cleaved to release the unconjugated or parent oligonucleotide. Thus, certain conjugate linkers may comprise one or more cleavable moieties. In certain embodiments, a cleavable moiety is a cleavable bond. In certain embodiments, a cleavable moiety is a group of atoms comprising at least one cleavable bond. In certain embodiments, a cleavable moiety comprises a group of atoms having one, two, three, four, or more than four cleavable bonds. In certain embodiments, a cleavable moiety is selectively cleaved inside a cell or subcellular compartment, such as a lysosome. In certain embodiments, a cleavable moiety is selectively cleaved by endogenous enzymes, such as nucleases.

[0276] In certain embodiments, a cleavable bond is selected from among: an amide, an ester, an ether, one or both esters of a phosphodiester, a phosphate ester, a carbamate, or a disulfide. In certain embodiments, a cleavable bond is one or both of the esters of a phosphodiester. In certain embodiments, a cleavable moiety comprises a phosphate or phosphodiester. In certain embodiments, the cleavable moiety is a phosphate linkage between an oligonucleotide and a conjugate moiety or conjugate group.

[0277] In certain embodiments, a cleavable moiety comprises or consists of one or more linker-nucleosides. In certain such embodiments, the one or more linker-nucleosides are linked to one another and/or to the remainder of the oligomeric compound through cleavable bonds. In certain embodiments, such cleavable bonds are unmodified phosphodiester bonds. In certain embodiments, a cleavable moiety is 2′-deoxynucleoside that is attached to either the 3′ or 5-terminal nucleoside of an oligonucleotide by a phosphate internucleoside linkage and covalently attached to the remainder of the conjugate linker or conjugate moiety by a phosphate or phosphorothioate linkage. In certain such embodiments, the cleavable moiety is 2′-deoxyadenosine.

### 3. Cell-Targeting Moieties

[0278] In certain embodiments, a conjugate group comprises a cell-targeting moiety. In certain embodiments, a conjugate group has the general formula:

[chemical structure]

[0279] wherein n is from 1 to about 3, m is 0 when n is 1, m is 1 when n is 2 or greater, j is 1 or 0, and k is 1 or 0.

[0280] In certain embodiments, n is 1, j is 1 and k is 0. In certain embodiments, n is 1, j is 0 and k is 1. In certain embodiments, n is 1, j is 1 and k is 1. In certain embodiments, n is 2, j is 1 and k is 0. In certain embodiments, n is 2, j is 0 and k is 1. In certain embodiments, n is 2, j is 1 and k is 1. In certain embodiments, n is 3, j is 1 and k is 0. In certain embodiments, n is 3, j is 0 and k is 1. In certain embodiments, n is 3, j is 1 and k is 1.

[0281] In certain embodiments, conjugate groups comprise cell-targeting moieties that have at least one tethered ligand. In certain embodiments, cell-targeting moieties comprise two tethered ligands covalently attached to a branching group.

[0282] In certain embodiments, each ligand of a cell-targeting moiety has an affinity for at least one type of receptor on a target cell. In certain embodiments, each ligand has an affinity for at least one type of receptor on the surface of a mammalian liver cell. In certain embodiments, each ligand has an affinity for the hepatic asialoglycoprotein receptor (ASGP-R). In certain embodiments, each ligand is a carbohydrate.

[0283] In certain embodiments, a conjugate group comprises a cell-targeting conjugate moiety. In certain embodiments, a conjugate group has the general formula:

[chemical structure]

[0284] wherein n is from 1 to about 3, m is 0 when n is 1, m is 1 when n is 2 or greater, j is 1 or 0, and k is 1 or 0.

[0285] In certain embodiments, n is 1, j is 1 and k is 0. In certain embodiments, n is 1, j is 0 and k is 1. In certain embodiments, n is 1, j is 1 and k is 1. In certain embodiments, n is 2, j is 1 and k is 0. In certain embodiments, n is 2, j is 0 and k is 1. In certain embodiments, n is 2, j is 1 and k is 1. In certain embodiments, n is 3, j is 1 and k is 0. In certain embodiments, n is 3, j is 0 and k is 1. In certain embodiments, n is 3, j is 1 and k is 1.

[0286] In certain embodiments, conjugate groups comprise cell-targeting moieties that have at least one tethered ligand. In certain embodiments, cell-targeting moieties comprise two tethered ligands covalently attached to a branching group. In certain embodiments, cell-targeting moieties comprise three tethered ligands covalently attached to a branching group.

### B. Certain Terminal Groups

[0287] In certain embodiments, oligomeric compounds comprise one or more terminal groups. In certain such embodiments, oligomeric compounds comprise a stabilized 5′-phosphate. Stabilized 5′-phosphates include, but are not limited to 5′-phosphonates, including, but not limited to 5′-vinylphosphonates. In certain embodiments, terminal groups comprise one or more abasic sugar moieties and/or inverted nucleosides. In certain embodiments, terminal groups comprise one or more 2′-linked nucleosides or sugar moieties. In certain such embodiments, the 2′-linked group is an abasic sugar moiety.

### III. Antisense Activity

[0288] In certain embodiments, oligomeric compounds and oligomeric duplexes are capable of hybridizing to a target nucleic acid, resulting in at least one antisense activity; such oligomeric compounds and oligomeric duplexes are antisense compounds. In certain embodiments, antisense compounds have antisense activity when they reduce or inhibit the amount or activity of a target nucleic acid by 25% or more in the standard cell assay. In certain embodiments, antisense compounds selectively affect one or more target nucleic acid. Such antisense compounds comprise a nucleobase sequence that hybridizes to one or more target nucleic acid, resulting in one or more desired antisense activity and does not hybridize to one or more non-target nucleic acid or does not hybridize to one or more non-target nucleic acid in such a way that results in significant undesired antisense activity.

[0289] In certain antisense activities, hybridization of an antisense compound to a target nucleic acid results in recruitment of a protein that cleaves the target nucleic acid. For example, certain antisense compounds result in RNase H mediated cleavage of the target nucleic acid. RNase H is a cellular endonuclease that cleaves the RNA strand of an RNA:DNA duplex. The DNA in such an RNA:DNA duplex need not be unmodified DNA. In certain embodiments, described herein are antisense compounds that are sufficiently “DNA-like” to elicit RNase H activity. In certain embodiments, one or more non-DNA-like nucleoside in the gap of a gapmer is tolerated.

[0290] In certain antisense activities, an antisense compound or a portion of an antisense compound is loaded into an RNA-induced silencing complex (RISC), ultimately resulting in cleavage of the target nucleic acid. For example, certain antisense compounds result in cleavage of the target nucleic acid by Argonaute. Antisense compounds that are loaded into RISC are RNAi compounds. RNAi compounds may be double-stranded (siRNA or dsRNAi) or single-stranded (ssRNA).

[0291] In certain embodiments, hybridization of an antisense compound to a target nucleic acid does not result in recruitment of a protein that cleaves that target nucleic acid. In certain embodiments, hybridization of the antisense compound to the target nucleic acid results in alteration of splicing of the target nucleic acid. In certain embodiments, hybridization of an antisense compound to a target nucleic acid results in inhibition of a binding interaction between the target nucleic acid and a protein or other nucleic acid. In certain embodiments, hybridization of an antisense compound to a target nucleic acid results in alteration of translation of the target nucleic acid.

[0292] Antisense activities may be observed directly or indirectly. In certain embodiments, observation or detection of an antisense activity involves observation or detection of a change in an amount of a target nucleic acid or protein encoded by such target nucleic acid, a change in the ratio of splice variants of a nucleic acid or protein and/or a phenotypic change in a cell or animal.

### IV. Certain Target Nucleic Acids

[0293] In certain embodiments, oligomeric compounds comprise or consist of an oligonucleotide comprising a region that is complementary to a target nucleic acid. In certain embodiments, the target nucleic acid is an endogenous RNA molecule. In certain embodiments, the target nucleic acid encodes a protein. In certain such embodiments, the target nucleic acid is selected from: a mature mRNA and a pre-mRNA, including intronic, exonic and untranslated regions. In certain embodiments, the target RNA is a mature mRNA. In certain embodiments, the target nucleic acid is a pre-mRNA. In certain embodiments, the target region is entirely within an intron. In certain embodiments, the target region spans an intron/exon junction. In certain embodiments, the target region is at least 50% within an intron.

### A. Complementarity/Mismatches to the Target Nucleic Acid

[0294] In certain embodiments, oligonucleotides are complementary to the target nucleic acid over the entire length of the oligonucleotide. In certain embodiments, oligonucleotides are 99%, 95%, 90%, 85%, or 80% complementary to the target nucleic acid. In certain embodiments, oligonucleotides are at least 80% complementary to the target nucleic acid over the entire length of the oligonucleotide and comprise a region that is 100% or fully complementary to a target nucleic acid. In certain embodiments, the region of full complementarity is from 6 to 20, 10 to 18, or 18 to 20 nucleobases in length.

[0295] It is possible to introduce mismatch bases without eliminating activity. For example, Gautschi et al (J. Natl. Cancer Inst. 93:463-471, March 2001) demonstrated the ability of an oligonucleotide having 100% complementarity to the bcl-2 mRNA and having 3 mismatches to the bcl-xL mRNA to reduce the expression of both bcl-2 and bcl-xL in vitro and in vivo. Furthermore, this oligonucleotide demonstrated potent anti-tumor activity in vivo. Maher and Dolnick (Nuc. Acid. Res. 16:3341-3358, 1988) tested a series of tandem 14 nucleobase oligonucleotides, and a 28 and 42 nucleobase oligonucleotides comprised of the sequence of two or three of the tandem oligonucleotides, respectively, for their ability to arrest translation of human DHFR in a rabbit reticulocyte assay. Each of the three 14 nucleobase oligonucleotides alone was able to inhibit translation, albeit at a more modest level than the 28 or 42 nucleobase oligonucleotides.

[0296] In certain embodiments, oligonucleotides are complementary to the target nucleic acid over the entire length of the oligonucleotide. In certain embodiments, oligonucleotides are 99%, 95%, 90%, 85%, or 80% complementary to the target nucleic acid. In certain embodiments, oligonucleotides are at least 80% complementary to the target nucleic acid over the entire length of the oligonucleotide and comprise a portion that is 100% or fully complementary to a target nucleic acid. In certain embodiments, the portion of full complementarity is 6, 7, 8, 9, 10, 11, 12, 13, 14, 15, 16, 17, 18, 19, 20, 21, 22, 23, or 24 nucleobases in length.

### B. DMPK

[0297] In certain embodiments, oligomeric compounds comprise or consist of an oligonucleotide comprising a region that is complementary to a target nucleic acid, wherein the target nucleic acid is a DMPK nucleic acid. In certain embodiments, a DMPK nucleic acid has the nucleobase sequence set forth in SEQ ID NO: 1 (the complement of GENBANK Accession No. NT_011109.16, truncated from nucleotides 18539000 to 18566000), SEQ ID NO: 2 (GENBANK Accession No. NM_004409.4). In certain embodiments, a DMPK nucleic acid has the nucleobase sequence set forth in SEQ ID NO: 3 (the complement of GENBANK Accession No. NC_000019.10, truncated from nucleosides 45767001 to 45786000), SEQ ID NO: 4 (GENBANK Accession No. NM_001288764.1), and/or SEQ ID NO: 5 (GENBANK Accession No. NM_001081560.2).

[0298] In certain embodiments, contacting a cell with an oligomeric compound complementary to SEQ ID NO: 1 or SEQ ID NO: 2 reduces the amount of DMPK RNA, and in certain embodiments reduces the amount of DMPK protein. In certain embodiments, contacting a cell with an oligomeric compound complementary to SEQ ID NO: 3, SEQ ID NO: 4, and/or SEQ ID NO: 5 reduces the amount of DMPK RNA, and in certain embodiments reduces the amount of DMPK protein. In certain embodiments, the oligomeric compound consists of a modified oligonucleotide. In certain embodiments, the oligomeric compound consists of a modified oligonucleotide and a conjugate group.

[0299] In certain embodiments, an oligomeric compound complementary to any one of SEQ ID NOs: 1-5 is capable of reducing the amount of DMPK RNA in vitro by at least 10%, at least 20%, at least 30%, at least 40%, at least 50%, at least 60%, at least 70%, at least 80%, or at least 90% when administered according to the standard cell assay. In certain embodiments, an oligomeric compound complementary to any one of SEQ ID NOs: 1-5 is capable of reducing the amount of DMPK protein in vitro by at least 10%, at least 20%, at least 30%, at least 40%, at least 50%, at least 60%, at least 70%, at least 80%, or at least 90% when administered according to the standard cell assay. In certain embodiments, an oligomeric compound complementary to any one of SEQ ID NOs: 1-5 is capable of reducing the amount of DMPK in the CSF of a subject by at least 10%, at least 20%, at least 30%, at least 40%, at least 50%, at least 60%, at least 70%, at least 80%, or at least 90%. In certain embodiments, an oligomeric compound complementary to any one of SEQ ID NOs: 1-5 is capable of reducing the amount of DMPK protein in the CSF of a subject by at least 10%, at least 20%, at least 30%, at least 40%, at least 50%, at least 60%, at least 70%, at least 80%, or at least 90%. In certain embodiments, an oligomeric compound complementary to any one of SEQ ID NOs: 1-5 is capable of reducing the amount of DMPK in the muscle tissue of a subject by at least 10%, at least 20%, at least 30%, at least 40%, at least 50%, at least 60%, at least 70%, at least 80%, or at least 90%. In certain embodiments, an oligomeric compound complementary to any one of SEQ ID NOs: 1-5 is capable of reducing the amount of DMPK protein in the muscle tissue of a subject by at least 10%, at least 20%, at least 30%, at least 40%, at least 50%, at least 60%, at least 70%, at least 80%, or at least 90%.

### C. Certain Target Nucleic Acids in Certain Tissues

[0300] In certain embodiments, oligomeric compounds comprise or consist of an oligonucleotide comprising a region that is complementary to a target nucleic acid, wherein the target nucleic acid is expressed in a pharmacologically relevant tissue. In certain embodiments, the pharmacologically relevant tissues are muscle tissues, such as heart, diaphragm, tibialis anterior, gastrocnemius, and quadriceps muscles. In certain embodiments, the target nucleic acid is expressed in a pharmacologically relevant cell. In certain embodiments the pharmacologically relevant cell is a muscle cell. In some embodiments the muscle cell is a skeletal muscle cell. In some embodiments, the skeletal muscle cell is tibialis anterior, gastrocnemius, or quadriceps.

[0301] In certain embodiments, the pharmacologically relevant tissues are tissues of the CNS. In some embodiments, the tissue is selected from cortex and hippocampus.

### V. Certain Pharmaceutical Compositions

[0302] In certain embodiments, described herein are pharmaceutical compositions comprising one or more oligomeric compounds. In certain embodiments, the one or more oligomeric compounds each consists of a modified oligonucleotide. In certain embodiments, the pharmaceutical composition comprises a pharmaceutically acceptable diluent or carrier. In certain embodiments, a pharmaceutical composition comprises or consists of a sterile saline solution and one or more oligomeric compound. In certain embodiments, the sterile saline is pharmaceutical grade saline. In certain embodiments, a pharmaceutical composition comprises or consists of one or more oligomeric compound and sterile water. In certain embodiments, the sterile water is pharmaceutical grade water. In certain embodiments, a pharmaceutical composition comprises or consists of one or more oligomeric compound and phosphate-buffered saline (PBS). In certain embodiments, the sterile PBS is pharmaceutical grade PBS. In certain embodiments, a pharmaceutical composition comprises or consists of one or more oligomeric compound and artificial cerebrospinal fluid (“artificial CSF” or “aCSF”). In certain embodiments, the artificial cerebrospinal fluid is pharmaceutical grade artificial cerebrospinal fluid.

[0303] In certain embodiments, a pharmaceutical composition comprises a modified oligonucleotide and PBS. In certain embodiments, a pharmaceutical composition consists of a modified oligonucleotide and PBS. In certain embodiments, a pharmaceutical composition consists essentially of a modified oligonucleotide and PBS. In certain embodiments, the PBS is pharmaceutical grade.

[0304] In certain embodiments, a pharmaceutical composition comprises a modified oligonucleotide and artificial cerebrospinal fluid. In certain embodiments, a pharmaceutical composition consists of a modified oligonucleotide and artificial cerebrospinal fluid. In certain embodiments, a pharmaceutical composition consists essentially of a modified oligonucleotide and artificial cerebrospinal fluid. In certain embodiments, the artificial cerebrospinal fluid is pharmaceutical grade. In certain embodiments, aCSF comprises sodium chloride, potassium chloride, sodium dihydrogen phosphate dihydrate, sodium phosphate dibasic anhydrous, calcium chloride dihydrate, and magnesium chloride hexahydrate. In certain embodiments, the pH of an aCSF solution is modulated with a suitable pH-adjusting agent, for example, with acids such as hydrochloric acid and alkalis such as sodium hydroxide, to a range of from about 7.1-7.3, or to about 7.2.

[0305] In certain embodiments, pharmaceutical compositions comprise one or more oligomeric compound and one or more excipients. In certain embodiments, excipients are selected from water, salt solutions, alcohol, polyethylene glycols, gelatin, lactose, amylase, magnesium stearate, talc, silicic acid, viscous paraffin, hydroxymethylcellulose and polyvinylpyrrolidone.

[0306] In certain embodiments, oligomeric compounds may be admixed with pharmaceutically acceptable active and/or inert substances for the preparation of pharmaceutical compositions or formulations. Compositions and methods for the formulation of pharmaceutical compositions depend on a number of criteria, including, but not limited to, route of administration, extent of disease, or dose to be administered.

[0307] In certain embodiments, pharmaceutical compositions comprising an oligomeric compound encompass any pharmaceutically acceptable salts of the oligomeric compound, esters of the oligomeric compound, or salts of such esters. In certain embodiments, pharmaceutical compositions comprising oligomeric compounds comprising one or more oligonucleotide, upon administration to an animal, including a human, are capable of providing (directly or indirectly) the biologically active metabolite or residue thereof. Accordingly, for example, the disclosure is also drawn to pharmaceutically acceptable salts of oligomeric compounds, prodrugs, pharmaceutically acceptable salts of such prodrugs, and other bioequivalents. Suitable pharmaceutically acceptable salts include, but are not limited to, sodium and potassium salts. In certain embodiments, prodrugs comprise one or more conjugate group attached to an oligonucleotide, wherein the conjugate group is cleaved by endogenous nucleases within the body.

[0308] Lipid moieties have been used in nucleic acid therapies in a variety of methods. In certain such methods, the nucleic acid, such as an oligomeric compound, is introduced into preformed liposomes or lipoplexes made of mixtures of cationic lipids and neutral lipids. In certain methods, DNA complexes with mono- or poly-cationic lipids are formed without the presence of a neutral lipid. In certain embodiments, a lipid moiety is selected to increase distribution of a pharmaceutical agent to a particular cell or tissue. In certain embodiments, a lipid moiety is selected to increase distribution of a pharmaceutical agent to fat tissue. In certain embodiments, a lipid moiety is selected to increase distribution of a pharmaceutical agent to muscle tissue.

[0309] In certain embodiments, pharmaceutical compositions comprise a delivery system. Examples of delivery systems include, but are not limited to, liposomes and emulsions. Certain delivery systems are useful for preparing certain pharmaceutical compositions including those comprising hydrophobic compounds. In certain embodiments, certain organic solvents such as dimethylsulfoxide are used.

[0310] In certain embodiments, pharmaceutical compositions comprise one or more tissue-specific delivery molecules designed to deliver the one or more pharmaceutical agents of the present invention to specific tissues or cell types. For example, in certain embodiments, pharmaceutical compositions include liposomes coated with a tissue-specific antibody.

[0311] In certain embodiments, pharmaceutical compositions comprise a co-solvent system. Certain of such co-solvent systems comprise, for example, benzyl alcohol, a nonpolar surfactant, a water-miscible organic polymer, and an aqueous phase. In certain embodiments, such co-solvent systems are used for hydrophobic compounds. A non-limiting example of such a co-solvent system is the VPD co-solvent system, which is a solution of absolute ethanol comprising 3% w/v benzyl alcohol, 8% w/v of the nonpolar surfactant Polysorbate 80™ and 65% w/v polyethylene glycol 300. The proportions of such co-solvent systems may be varied considerably without significantly altering their solubility and toxicity characteristics. Furthermore, the identity of co-solvent components may be varied: for example, other surfactants may be used instead of Polysorbate 80™; the fraction size of polyethylene glycol may be varied; other biocompatible polymers may replace polyethylene glycol, e.g., polyvinyl pyrrolidone; and other sugars or polysaccharides may substitute for dextrose.

[0312] In certain embodiments, pharmaceutical compositions are prepared for oral administration. In certain embodiments, pharmaceutical compositions are prepared for buccal administration. In certain embodiments, a pharmaceutical composition is prepared for administration by injection (e.g., intravenous, subcutaneous, intramuscular, intrathecal (IT), intracerebroventricular (ICV), etc.). In certain of such embodiments, a pharmaceutical composition comprises a carrier and is formulated in aqueous solution, such as water or physiologically compatible buffers such as Hanks's solution, Ringer's solution, or physiological saline buffer. In certain embodiments, other ingredients are included (e.g., ingredients that aid in solubility or serve as preservatives). In certain embodiments, injectable suspensions are prepared using appropriate liquid carriers, suspending agents and the like. Certain pharmaceutical compositions for injection are presented in unit dosage form, e.g., in ampoules or in multi-dose containers. Certain pharmaceutical compositions for injection are suspensions, solutions or emulsions in oily or aqueous vehicles, and may contain formulatory agents such as suspending, stabilizing and/or dispersing agents. Certain solvents suitable for use in pharmaceutical compositions for injection include, but are not limited to, lipophilic solvents and fatty oils, such as sesame oil, synthetic fatty acid esters, such as ethyl oleate or triglycerides, and liposomes.

[0313] Under certain conditions, certain compounds disclosed herein act as acids. Although such compounds may be drawn or described in protonated (free acid) form, or ionized and in association with a cation (salt) form, aqueous solutions of such compounds exist in equilibrium among such forms. For example, a phosphate linkage of an oligonucleotide in aqueous solution exists in equilibrium among free acid, anion and salt forms. Unless otherwise indicated, compounds described herein are intended to include all such forms. Moreover, certain oligonucleotides have several such linkages, each of which is in equilibrium. Thus, oligonucleotides in solution exist in an ensemble of forms at multiple positions all at equilibrium. The term “oligonucleotide” is intended to include all such forms. Drawn structures necessarily depict a single form. Nevertheless, unless otherwise indicated, such drawings are likewise intended to include corresponding forms. Herein, a structure depicting the free acid of a compound followed by the term “or a salt thereof” expressly includes all such forms that may be fully or partially protonated/de-protonated/in association with a cation. In certain instances, one or more specific cation is identified.

[0314] In certain embodiments, modified oligonucleotides or oligomeric compounds are in aqueous solution with sodium. In certain embodiments, modified oligonucleotides or oligomeric compounds are in aqueous solution with potassium. In certain embodiments, modified oligonucleotides or oligomeric compounds are in PBS. In certain embodiments, modified oligonucleotides or oligomeric compounds are in water. In certain such embodiments, the pH of the solution is adjusted with NaOH and/or HCl to achieve a desired pH.

[0315] Herein, certain specific doses are described. A dose may be in the form of a dosage unit. For clarity, a dose (or dosage unit) of a modified oligonucleotide or an oligomeric compound in milligrams indicates the mass of the free acid form of the modified oligonucleotide or oligomeric compound. As described above, in aqueous solution, the free acid is in equilibrium with anionic and salt forms. However, for the purpose of calculating dose, it is assumed that the modified oligonucleotide or oligomeric compound exists as a solvent-free, sodium-acetate free, anhydrous, free acid. For example, where a modified oligonucleotide or an oligomeric compound is in solution comprising sodium (e.g., saline), the modified oligonucleotide or oligomeric compound may be partially or fully de-protonated and in association with Na+ ions. However, the mass of the protons is nevertheless counted toward the weight of the dose, and the mass of the Na+ ions is not counted toward the weight of the dose. Thus, for example, a dose, or dosage unit, of 10 mg of Compound No. 598769, equals the number of fully protonated molecules that weighs 10 mg. This would be equivalent to 10.59 mg of solvent-free, sodium acetate-free, anhydrous sodiated Compound No. 598769. When an oligomeric compound comprises a conjugate group, the mass of the conjugate group is included in calculating the dose of such oligomeric compound. If the conjugate group also has an acid, the conjugate group is likewise assumed to be fully protonated for the purpose of calculating dose.

### IV. Certain Hotspot Regions

[0316] In certain embodiments, nucleobases in the ranges specified below comprise a hotspot region of DMPK nucleic acid.

### 1. Nucleobases 19888-19942 of SEO ID NO:1

[0317] In certain embodiments, nucleobases 19888-19942 of SEQ ID NO: 1 comprise a hotspot region. In certain embodiments, modified oligonucleotides are complementary within nucleobases 19888-19942 of SEQ ID NO: 1. In certain embodiments, modified oligonucleotides are 20 nucleobases in length. In certain embodiments, modified oligonucleotides are 18 nucleobases in length. In certain embodiments, modified oligonucleotides are 16 nucleobases in length. In certain embodiments, modified oligonucleotides are gapmers. In certain embodiments, modified oligonucleotides are mixed wing gapmers.

[0318] In certain embodiments, the gapmers are 5-10-5 MOE gapmers. In certain embodiments, the gapmers are 6-10-4 MOE gapmers. In certain embodiments, the gapmers are 6-8-4 MOE gapmers, 4-10-6 MOE gapmers, 4-8-6 MOE gapmers, 5-8-5 MOE gapmers, or 4-9-3 or 3-10-3 mixed MOE/cEt gapmers. In certain embodiments, the mixed wing gapmers have the sugar motif in order from 5′ to 3′: ekkddddddddddkke, ekkkddddddddkkke, kekddddddddddkkk, kkeddddddddddkkk, or kkkedddddddddkkk; wherein ‘d’ represents a 2′-β-D-deoxyribosyl sugar moiety, ‘k’ represents a cEt sugar moiety, and ‘e’ represents a 2′-MOE sugar moiety. In certain embodiments, the gapmers comprise a 2′-substituted nucleoside in the gap. In certain embodiments, the 2′-substituted nucleoside comprises a 2′-OMe sugar moiety. In certain embodiments, the 2′-substituted nucleoside is at position 2 of the gap (5′ to 3′). In certain embodiments, the gapmers have the sugar motif in order from 5′ to 3′: kkkdyddddddddkkk; wherein ‘d’ represents a 2′-β-D-deoxyribosyl sugar moiety, ‘k’ represents a cEt sugar moiety, ‘e’ represents a 2′-MOE sugar moiety, and “y” represents a 2′-OMe sugar moiety.

[0319] In certain embodiments, the internucleoside linkages of the modified oligonucleotides are phosphorothioate internucleoside linkages and phosphodiester internucleoside linkages. In certain embodiments, the phosphodiester (“o”) and phosphorothioate (“s”) internucleoside linkages are arranged in order from 5′ to 3′: In certain embodiments, modified nucleotides have an internucleoside linkage motif of sooooossssssssssoss, soooosssssssssoss, soooossssssssssooss, sooosssssssssooss, sooossssssssssoooss, or soosssssssssoooss wherein each “s” represents a phosphorothioate internucleoside linkage and each “o” represents a phosphodiester internucleoside linkage.

[0320] The nucleobase sequences of SEQ ID NOs: 160, 249, 313, 503, 588, 647, 755, 789, 882, 972, 1248-1254, 1263-1264, 1284-1285, 1332, 1400 are complementary within nucleobases 19888-19942 of SEQ ID NO: 1.

[0321] The nucleobase sequence of Compound Nos.: 1003033, 1017049, 1338115, 1380289, 1380457, 1380460, 1380571, 1380679, 1380748, 1380870, 1381153, 1400769, 1400772, 1459315, 1459345, 1459346, 1459348, 1459349, 1459351-1459356, 1459367-1459369,1459372-1459375, 1459377-1459379,1459393-1459396, 1459398-1459402, 1459422-1459429, 1459439-1459446, 1459456-1459459, 1459461, 1459463, 1459464, 1459980-1459983, and 1459988-1549991 are complementary within nucleobases 19888-19942 of SEQ ID NO: 1.

[0322] In certain embodiments, modified oligonucleotides complementary within nucleobases 19888-19942 of SEQ ID NO: 1 achieve at least 41% reduction of DMPK RNA in vitro in the standard cell assay. In certain embodiments, modified oligonucleotides complementary within nucleobases 19888-19942 of SEQ ID NO: 1 achieve an average of 81% reduction of DMPK RNA in vitro in the standard cell assay. In certain embodiments, modified oligonucleotides complementary within nucleobases 19888-19942 of SEQ ID NO: 1 achieve a maximum of 98% reduction of DMPK RNA in vitro in the standard cell assay.

### 2. Additional Hotspot Regions

[0323] In certain embodiments, the ranges described in the Table below comprise hotspot regions. Each hotspot region begins with the nucleobase of SEQ ID NO:1 identified in the “Start Site SEQ ID NO: 1” column and ends with the nucleobase of SEQ ID NO: 1 identified in the “Stop Site SEQ ID NO: 1” column. In certain embodiments, modified oligonucleotides are complementary within any of the hotspot regions 1-23, as defined in the table below. In certain embodiments, modified oligonucleotides are 20 nucleobases in length. In certain embodiments, modified oligonucleotides are 18 nucleobases in length. In certain embodiments, modified oligonucleotides are 16 nucleobases in length. In certain embodiments, modified oligonucleotides are gapmers. In certain embodiments, modified oligonucleotides are mixed wing gapmers.

[0324] In certain embodiments, the gapmers are 5-10-5 MOE gapmers. In certain embodiments, the gapmers are 6-10-4 MOE gapmers. In certain embodiments, the gapmers are 6-8-4 MOE gapmers, 4-10-6 MOE gapmers, 4-8-6 MOE gapmers, 5-8-5 MOE gapmers, or 4-9-3 or 3-10-3 mixed MOE/cEt gapmers. In certain embodiments, the mixed wing gapmers have the sugar motif in order from 5′ to 3′: ekkddddddddddkke, ekkkddddddddkkke, kekddddddddddkkk, kkeddddddddddkkk, or kkkedddddddddkkk; wherein ‘d’ represents a 2′-β-D-deoxyribosyl sugar moiety, ‘k’ represents a cEt sugar moiety, and ‘e’ represents a 2′-MOE sugar moiety. In certain embodiments, the gapmers comprise a 2′-substituted nucleoside in the gap. In certain embodiments, the 2′-substituted nucleoside comprises a 2′-OMe sugar moiety. In certain embodiments, the 2′-substituted nucleoside is at position 2 of the gap (5′ to 3′). In certain embodiments, the gapmers have the sugar motif in order from 5′ to 3′: kkkdyddddddddkkk; wherein ‘d’ represents a 2′-β-D-deoxyribosyl sugar moiety, ‘k’ represents a cEt sugar moiety, ‘e’ represents a 2′-MOE sugar moiety, and “y” represents a 2′-OMe sugar moiety.

[0325] In certain embodiments, the internucleoside linkages of the modified oligonucleotides are phosphorothioate internucleoside linkages and phosphodiester internucleoside linkages. In certain embodiments, the phosphodiester (“o”) and phosphorothioate (“s”) internucleoside linkages are arranged in order from 5′ to 3′: In certain embodiments, modified nucleotides have an internucleoside linkage motif of sooooossssssssssoss, soooosssssssssoss, soooossssssssssooss, sooosssssssssooss, sooossssssssssoooss, or soosssssssssoooss wherein each “s” represents a phosphorothioate internucleoside linkage and each “o” represents a phosphodiester internucleoside linkage.

[0326] The nucleobase sequences of compounds listed in the “Compound No. in range” column in the table below are complementary to SEQ ID NO: 2 within the specified hotspot region. The nucleobase sequences of the oligonucleotides listed in the “SEQ ID NO: in range” column in the table below are complementary to the target sequence, SEQ ID NO: 2, within the specified hotspot region.

[0327] In certain embodiments, modified oligonucleotides complementary to nucleobases within the hotspot region achieve at least “Min. % Red. in vitro” (minimum % reduction, relative to untreated control cells) of DPMK RNA in vitro in the standard cell assay, as indicated in the table below. In certain embodiments, modified oligonucleotides complementary to nucleobases within the hotspot region achieve an average of “Avg. % Red. in vitro” (average % reduction, relative to untreated control cells) of DMPK RNA in vitro in the standard cell assay, as indicated in the table below. In certain embodiments, modified oligonucleotides complementary to nucleobases within the hotspot region achieve a maximum of “Max. % Red. in vitro” (maximum % reduction, relative to untreated control cells) of DMPK RNA in vitro in the standard cell assay, as indicated in the table below.

TABLE 1
DMPK Hotspots

| | SEQ ID | SEQ ID | | | | | |
|---|---|---|---|---|---|---|---|
| | NO: 1 | NO: 1 | Avg. % | Min. % | Max. % | | |
| Hotspot | Start | Stop | Red. in | Red. in | Red. in | | |
| ID | Site | Site | vitro | vitro | vitro | Compound No. in range | SEQ ID NO in range |
| 1 | 9052 | 9103 | 68 | 32 | 94 | 1016769-1016778, 1060884, | 132, 186, 256, 327, |
| | | | | | | 1380292, 1380370, 1380716, | 446, 1374, 1596, 1667, |
| | | | | | | 1381101, 1381134 | 1747, 1818, 1895, |
| | | | | | | | 1964, 2038, 2121, 2191 |
| 2 | 9228 | 9256 | 81 | 71 | 92 | 1016782-1016785, 1380835, | 510, 1173, 1668, 1748, |
| | | | | | | 1380875 | 1819, 1896 |
| 3 | 9574 | 9610 | 86 | 83 | 89 | 1016802-1016806 | 1376, 1448, 1526, |
| | | | | | | | 1599, 1670 |
| 4 | 10010 | 10043 | 84 | 75 | 90 | 1016832-1016835 | 1823, 1900, 1969, 2043 |
| 5 | 10271 | 10298 | 78 | 54 | 89 | 1016845-1016852 | 1380, 1452, 1530, |
| | | | | | | | 1901, 1970, 2044, |
| | | | | | | | 2127, 2197 |
| 6 | 10364 | 10391 | 83 | 73 | 91 | 1016858-1016865, 1382695 | 1206, 1381, 1453, |
| | | | | | | | 1531, 1604, 1971, |
| | | | | | | | 2045, 2128, 2198 |
| 7 | 10683 | 10707 | 79 | 62 | 91 | 1016890-1016892, 1060880, | 640, 714, 821, 1172, |
| | | | | | | 1380295, 1380373, | 1677, 1757, 1828 |
| | | | | | | 1380516, 1380995, 1381015 | |
| 8 | 10709 | 10734 | 79 | 67 | 93 | 1060886, 1380431, 1380656, | 43, 115, 202, 900, 960, |
| | | | | | | 1380700, 1380721, 1381015, | 1027, 1195, 1905 |
| | | | | | | 1381069, 1382680 | |
| 9 | 10812 | 10857 | 81 | 77 | 87 | 1016898-1016903 | 1384, 1456, 1534, |
| | | | | | | | 1607, 1678, 1758 |
| 10 | 11853 | 11879 | 82 | 75 | 86 | 1016930-1016934 | 1387, 1977, 2051, |
| | | | | | | | 2134, 2204 |
| 11 | 13310 | 13350 | 83 | 70 | 94 | 570428, 1002722, 1002723, | 1296, 1351, 1425, |
| | | | | | | 1002725, 1002727-1002729, | 1501, 1793, 1867, |
| | | | | | | 1016947-1016949, 1460184 | 1979, 2052, 2083, |
| | | | | | | | 2092, 2206 |
| 12 | 13999 | 14046 | 70 | 35 | 90 | 1002583-1002586, 1016726- | 49, 159, 208, 293, 402, |
| | | | | | | 1016728, 1060873, 1380598, | 471, 556, 618, 676, |
| | | | | | | 1380842, 1380864, 1380944, | 692, 754, 817, 901, |
| | | | | | | 1380978, 1381079, 1381080, | 971, 1038, 1744, 1791, |
| | | | | | | 1381108, 1381255, 1381363, | 1863, 1960, 2016, |
| | | | | | | 1381470, 1381501, 1381507, | 2119, 2163 |
| | | | | | | 1381657, 1381677, 1459343, | |
| | | | | | | 1459344, 1459364, 1459365, | |
| | | | | | | 1459366, 1459392, 1459420 | |
| 13 | 14090 | 14118 | 87 | 84 | 89 | 1002591, 1016733, 1016734, | 1718, 1814, 1891, 1941 |
| | | | | | | 1002593 | |
| 14 | 14232 | 14258 | 70 | 56 | 88 | 570263, 570266, 1380496, | 41, 140, 888, 981, |
| | | | | | | 1380688, 1380778, 1381212, | 1033, 2081, 2154 |
| | | | | | | 1381287 | |
| 15 | 17565 | 17594 | 79 | 48 | 98 | 1002947, 1002948, 1002953, | 444, 508, 573, 1874, |
| | | | | | | 1017016, 1060901, 1380588, | 1949, 2060, 2103 |
| | | | | | | 1380785, 1381123 | |
| 16 | 17731 | 17761 | 80 | 57 | 99 | 570725, 1017023-1017026, | 274, 337, 410, 526, |
| | | | | | | 1309473, 1309469, 1380286, | 575, 665, 712, 829, |
| | | | | | | 1380432, 1380469, 1380647, | 897, 1397, 1467, 2138, |
| | | | | | | 1380690, 1380847, 1381021, | 2210, 2270, |
| | | | | | | 1381132, 1381214 | |
| 17 | 19719 | 19753 | 86 | 70 | 94 | 1003014-1003020 | 1432, 1509, 1580, |
| | | | | | | | 1654, 1729, 1801 |
| 18 | 19795 | 19869 | 84 | 29 | 100 | 1003025-1003030, 1017040- | 355, 412, 506, 567, |
| | | | | | | 1017046, 1060864, 1060883, | 673, 747, 832, 904, |
| | | | | | | 1060889, 1060891, 1380454, | 956, 1399, 1469, 1545, |
| | | | | | | 1380508, 1380630, 1380777, | 1581, 1655, 1730, |
| | | | | | | 1380803, 1380830, 1380963, | 1841, 1916, 1988, |
| | | | | | | 1381176, 1381183 | 1989, 2027, 2106, 2177 |
| 19 | 19888 | 19942 | 81 | 41 | 98 | 1003033, 1003034, 1017049, | 160, 249, 313, 371, |
| | | | | | | 1017051, 1060860, 1060870, | 424, 503, 588, 647, |
| | | | | | | 1207018, 1207019, 1207020, | 755, 789, 882, 1248- |
| | | | | | | 1207021, 1207024, 1207025, | 1254, 1263-1264, |
| | | | | | | 1207072, 1207074, 1207075, | 1266-1273, 1284-1285, |
| | | | | | | 1207130, 1213273, 1213275, | 1332, 1400, 1489, |
| | | | | | | 1213276, 1213282, 1215869, | 1619, 1637, 1638, |
| | | | | | | 1215870, 1273291, 1273292, | 1639, 1656, 1709, |
| | | | | | | 1273297, 1273301, 1338115, | 2006, 2079, 2082, |
| | | | | | | 1380289, 1380457, 1380460, | 2085, 2153, 2303 |
| | | | | | | 1380571, 1380679, 1380748, | |
| | | | | | | 1380870, 1381153, 1381230, | |
| | | | | | | 1381513, 1381524, 1381668, | |
| | | | | | | 1400769, 1400772, 1459345, | |
| | | | | | | 1459346, 1459348, 1459349, | |
| | | | | | | 1459351-1459356, 1459367- | |
| | | | | | | 1459369, 1459372-1459375, | |
| | | | | | | 1459377-1459379, 1459393- | |
| | | | | | | 1459396, 1459398-1459402, | |
| | | | | | | 1459422-1459429, 1459439- | |
| | | | | | | 1459446, 1459456-1459459, | |
| | | | | | | 1459461, 1459463, 1459464, | |
| | | | | | | 1459980-1459983, 1459988- | |
| | | | | | | 1549991 | |
| 20 | 19915 | 19942 | 85 | 61 | 98 | 1003033, 1003034, 1017049, | 503, 588, 647, 755, |
| | | | | | | 1380289, 1380457, 1380460, | 789, 882, 1263, 1264, |
| | | | | | | 1380571, 1380679, 1380748, | 1332, 1400, 1619, |
| | | | | | | 1017051, 1060860, 1060870, | 1637, 1638, 1639, |
| | | | | | | 1207018, 1207019, 1207020, | 1656, 1709, 2006, |
| | | | | | | 1207021, 1207024, 1207025, | 2079, 2082, 2085, |
| | | | | | | 1207072, 1207074, 1207075, | 2153, 2303 |
| | | | | | | 1207130, 1213275, 1213276, | |
| | | | | | | 1213282, 1215869, 1215870, | |
| | | | | | | 1273291, 1273292, 1273297, | |
| | | | | | | 1273301, 1380870, 1338115, | |
| | | | | | | 1381153, 1400769, 1400772, | |
| | | | | | | 1459980-1459983, 1459988- | |
| | | | | | | 1459991 | |
| 21 | 20871 | 20905 | 79 | 35 | 100 | 570784-570787, 1003047, 1003048, | 144, 233, 291, 328, |
| | | | | | | 1059892, 1059894, 1059903, | 435, 482, 564, 642, |
| | | | | | | 1380294, 1380304, 1380382, | 748, 808, 874, 955, |
| | | | | | | 1380403, 1380453, 1380597, | 1339, 1340, 1341, |
| | | | | | | 1380678, 1380975, 1380977, | 1492, 1732, 1803, |
| | | | | | | 1381178, 1381332, 1381435 | 2321, 2322, 2323 |
| 22 | 21117 | 21153 | 82 | 56 | 98 | 1003078-1003081, 1017069, | 576, 652, 724, 811, |
| | | | | | | 1060875, 1060898, 1380355, | 870, 1359, 1433, 1510, |
| | | | | | | 1380489, 1380502, 1380693, | 1583, 1692 |
| | | | | | | 1380758 | |
| 23 | 22118 | 22143 | 84* | 84* | 84* | 1381456, 1459383, 1459386, | 696, 1255-1259, 1265, |
| | | | | | | 1459387, 1459407-1459409, | 1274-1277, 1283, |
| | | | | | | 1459412, 1459413, 1459415, | 1330, 1331 |
| | | | | | | 1459421, 1459433-1459438, | |
| | | | | | | 1459449, 1459450-1459453, | |
| | | | | | | 1459455, 1459462, 1459465 | |

*Only a single compound was tested in vitro; average in vivo reduction in cortex is 46.7% with the RTS38096 primer probe set.

### Certain Comparator Compositions

[0328] In certain embodiments, ISIS-DMPK_{Rx} (generic name baliforsen; Compound No. 598769), entered into clinical trials for treatment of DM1, is a comparator compound (see, e.g., Thornton, et al., Neurology, 86 (16 supplement): P3.163, 2016). ISIS-DMV1PK_{Rx}, 598769 was previously described in WO2015/021457, incorporated herein by reference, and has a nucleobase sequence (from 5′ to 3′) of TCCCGAATGTCCGACA (SEQ ID NO: 1337). The sugar motif for Compound No. 598769 is (from 5′ to 3′): eekkddddddddkkee; wherein each “e” represents a 2′-MOE sugar moiety, each “d” represents a 2′-β-D-deoxyribosyl sugar moiety, and each “k” represents a cEt sugar moiety. The internucleoside linkage motif for Compound No. 598769 is (from 5′ to 3′): sssssssssssssss; wherein each “s” represents a phosphorothioate internucleoside linkage. Each cytosine nucleobase in Compound No. 598769 is a 5-methylcytosine.

[0329] In certain embodiments, Compound No. 486178, although not entered into clinical trials, is a comparator compound (see, e.g., Yadava, et al., Hum. Mol. Genetics, 29(9): 1440-1453, 2020; Pandey, et al., J. Pharamacol. Expt. Therapy, 355(2):329-340, 2015). Compound No. 486178 was previously described in WO 2015/021457 A2, WO 2017/053995 A1, and WO 2019/118916 A1, each of which is incorporated herein by reference, and consists of the nucleobase sequence (from 5′ to 3′): ACAATAAATACCGAGG (SEQ ID NO: 1336). The sugar motif for Compound No. 486178 is (from 5′ to 3′): kkkddddddddddkkk; wherein each “d” represents a 2′-β-D-deoxyribosyl sugar moiety, and each “k” represents a cEt sugar moiety. The internucleoside linkage motif for Compound No. 486178 is (from 5′ to 3′): sssssssssssssss; wherein each “s” represents a phosphorothioate internucleoside linkage. Each cytosine nucleobase in Compound No. 486178 is a 5-methylcytosine.

[0330] In certain embodiments, compounds described herein are superior relative to compounds described WO2015/021457, because they demonstrate one or more improved properties, such as activity, potency, and/or tolerability.

### Nonlimiting Disclosure and Incorporation by Reference

[0331] Each of the literature and patent publications listed herein is incorporated by reference in its entirety.

[0332] While certain compounds, compositions and methods described herein have been described with specificity in accordance with certain embodiments, the following examples serve only to illustrate the compounds described herein and are not intended to limit the same. Each of the references, GenBank accession numbers, ENSEMBL identifiers, and the like recited in the present application is incorporated herein by reference in its entirety.

[0333] Although the sequence listing accompanying this filing identifies each sequence as either “RNA” or “DNA” as required, in reality, those sequences may be modified with any combination of chemical modifications. One of skill in the art will readily appreciate that such designation as “RNA” or “DNA” to describe modified oligonucleotides is, in certain instances, arbitrary. For example, an oligonucleotide comprising a nucleoside comprising a 2′-OH sugar moiety and a thymine base could be described as a DNA having a modified sugar (2′-OH in place of one 2′-H of DNA) or as an RNA having a modified base (thymine (methylated uracil) in place of an uracil of RNA). Accordingly, nucleic acid sequences provided herein, including, but not limited to those in the sequence listing, are intended to encompass nucleic acids containing any combination of natural or modified RNA and/or DNA, unless otherwise stated, including, but not limited to such nucleic acids having modified nucleobases. By way of further example and without limitation, an oligomeric compound having the nucleobase sequence “ATCGATCG” encompasses any oligomeric compounds having such nucleobase sequence, whether modified or unmodified, including, but not limited to, such compounds comprising RNA bases, such as those having sequence “AUCGAUCG” and those having some DNA bases and some RNA bases such as “AUCGATCG” and oligomeric compounds having other modified nucleobases, such as “AT^{m}CGAUCG,” wherein ^{m}C indicates a cytosine base comprising a methyl group at the 5-position.

[0334] Certain compounds described herein (e.g., modified oligonucleotides) have one or more asymmetric center and thus give rise to enantiomers, diastereomers, and other stereoisomeric configurations that may be defined, in terms of absolute stereochemistry, as (R) or (S), as a or β such as for sugar anomers, or as (D) or (L), such as for amino acids, etc. Compounds provided herein that are drawn or described as having certain stereoisomeric configurations include only the indicated compounds. Compounds provided herein that are drawn or described with undefined stereochemistry include all such possible isomers, including their stereorandom and optically pure forms, unless specified otherwise. Likewise, tautomeric forms of the compounds herein are also included unless otherwise indicated. Unless otherwise indicated, compounds described herein are intended to include corresponding salt forms.

[0335] The compounds described herein include variations in which one or more atoms are replaced with a non-radioactive isotope or radioactive isotope of the indicated element. For example, compounds herein that comprise hydrogen atoms encompass all possible deuterium substitutions for each of the ¹H hydrogen atoms. Isotopic substitutions encompassed by the compounds herein include but are not limited to: ²H or ³H in place of ¹H, ¹³C or ¹⁴C in place of ¹²C, ¹⁵N in place of ¹⁴N, ¹⁷O or ¹⁸O in place of ¹⁶O, and ³³S, ³⁴S, ³⁵S, or ³⁶S in place of ³²S. In certain embodiments, non-radioactive isotopic substitutions may impart new properties on the oligomeric compound that are beneficial for use as a therapeutic or research tool. In certain embodiments, radioactive isotopic substitutions may make the compound suitable for research or diagnostic purposes such as imaging.

### EXAMPLES

[0336] The following examples illustrate certain embodiments of the present disclosure and are not limiting. Moreover, where specific embodiments are provided, the inventors have contemplated generic application of those specific embodiments. For example, disclosure of an oligonucleotide having a particular motif provides reasonable support for additional oligonucleotides having the same or similar motif. And, for example, where a particular high-affinity modification appears at a particular position, other high-affinity modifications at the same position are considered suitable, unless otherwise indicated.

### Example 1: Effect of 5-10-5 MOE Modified Oligonucleotides with Mixed PO/PS Backbone Internucleoside Linkages on Human DMPK In Vitro, Single Dose

[0337] Modified oligonucleotides complementary to human DMPK nucleic acid were synthesized and tested for their effect on DMPK RNA levels in vitro. The modified oligonucleotides were tested in a series of experiments using the same culture conditions. The results are presented in the table below.

[0338] The modified oligonucleotides in the table below are 5-10-5 MOE modified oligonucleotides with mixed PO/PS backbone internucleoside linkages. The modified oligonucleotides are 20 nucleosides in length. The sugar motif for the modified oligonucleotides is (from 5′ to 3′): eeeeeddddddddddeeeee; wherein each ‘d’ represents a 2′-β-D-deoxyribosyl sugar moiety, and each ‘e’ represents a 2′-MOE sugar moiety. The internucleoside linkage motif for the modified oligonucleotides is (from 5′ to 3′): soooossssssssssooss wherein each ‘s’ represents a phosphorothioate internucleoside linkage, and each ‘o’ represents a phosphodiester internucleoside linkage. All cytosine nucleobases are 5-methylcytosines.

[0339] “Start site” indicates the 5′-most nucleoside of the target sequence to which the modified oligonucleotide is complementary. “Stop site” indicates the 3′-most nucleoside of the target sequence to which the modified oligonucleotide is complementary. As shown in the tables below, the modified oligonucleotides are complementary to SEQ ID NO: 1 (the complement of GENBANK Accession No. NT_011109.16, truncated from nucleotides 18539000 to 18566000), SEQ ID NO: 2 (GENBANK Accession No. NM_004409.4). ‘N/A’ indicates that the modified oligonucleotide is not 100% complementary to that particular target sequence.

[0340] Cultured A431 cells at a density of 10,000 cells per well were treated with 4,000 nM of modified oligonucleotide by free uptake. After a treatment period of approximately 48 hours, RNA was isolated from the cells and DMPK RNA levels were measured by quantitative real-time RTPCR. HumanDMPK primer probe set RTS38095 (forward nucleobase sequence CTGAGCCGGGAGATGGA, designated herein as SEQ ID NO: 6; reverse nucleobase sequence GGACGTGTGCCTCTAGGT, designated herein as SEQ ID NO: 7; probe nucleobase sequence TGACTGGCGAAGTTCTGGTTGTCC, designated herein as SEQ ID NO: 8) was used to measure DMPK RNA levels. DMPK RNA levels were normalized to total RNA content, as measured by RIBOGREEN®. Results are presented as percent of DMPK RNA, relative to untreated control cells (% UTC). The values marked by the symbol “†” indicate that the modified oligonucleotide is complementary to the amplicon region of the primer probe set. Additional assays may be used to measure the activity of the modified oligonucleotides complementary to the amplicon region.

[0341] Each separate experiment described in this example is identified by an Assay Identification letter in the table column labeled “AID”.

TABLE 2
Reduction of DMPK RNA by 5-10-5 MOE modified oligonucleotides with mixed PS/PO backbone
internucleoside linkages

| | SEQ ID | SEQ ID | SEQ ID | SEQ ID | | | | |
|---|---|---|---|---|---|---|---|---|
| | NO: 1 | NO: 1 | NO: 2 | NO: 2 | | DMPK | | SEQ |
| Compound | Start | Stop | Start | Stop | Nucleobase Sequence | (% | | ID |
| No. | Site | Site | Site | Site | (5′ to 3′) | UTC) | AID | NO |
| 1052866 | 24728 | 24747 | 2786 | 2805 | AGACAATAAATACCGAGGAA | 38 | A | 18 |
| 1052873 | 19496 | 19515 | 1357 | 1376 | CTTCCCGAATGTCCGACAGT | 62 | A | 19 |
| 1052874 | 19497 | 19516 | 1358 | 1377 | CCTTCCCGAATGTCCGACAG | 78 | A | 20 |
| 1052881 | 21094 | 21113 | N/A | N/A | ATGTGTAATGTTGTCCAGTA | 13 | A | 21 |
| 1380291 | 14533 | 14552 | N/A | N/A | CAGCTTCACCCTAGGACTGT | 60 | A | 22 |
| 1380335 | 19360 | 19379 | N/A | N/A | AAGTGGCCCCTCCAGCATTT | 50 | A | 23 |
| 1380384 | 17699 | 17718 | N/A | N/A | ACACTCTCCATAATTCTCTA | 36 | A | 24 |
| 1380388 | 22196 | 22215 | N/A | N/A | AAATCAGGATTCCCACCTGC | 90 | A | 25 |
| 1380412 | 24633 | 24652 | 2691 | 2710 | CGAGGTCAATAAATATCCAA | 49 | A | 26 |
| 1380425 | 20815 | 20834 | N/A | N/A | CCTAGGCTGGAATCTATCAT | 117 | A | 27 |
| 1380445 | 22294 | 22313 | N/A | N/A | CCTAATGCCCTCACGACAAA | 88 | A | 28 |
| 1380447 | 14186 | 14205 | N/A | N/A | TACCTCTAGATTCAGATGCA | 30 | A | 29 |
| 1380462 | 22051 | 22070 | N/A | N/A | TTACTTAATGCCCCACTGTA | 94 | A | 30 |
| 1380463 | 9687 | 9706 | N/A | N/A | CAGGACTCTACGATTCCAAA | 66 | A | 31 |
| 1380486 | 17607 | 17626 | N/A | N/A | TCAGCAAAAGGGCACCCAGA | 125 | A | 32 |
| 1380505 | 19666 | 19685 | N/A | N/A | CAGTAAGGTTCCAAGACTGA | 86 | A | 33 |
| 1380530 | 24458 | 24477 | 2516 | 2535 | ACAAGAAAGCTTTGCACTTT | 99 | A | 34 |
| 1380533 | 21977 | 21996 | N/A | N/A | TGCTTCTGTTCAGGAAGTCC | 85 | A | 35 |
| 1380537 | 15919 | 15938 | 673 | 692 | ACTTGCTCAGCAGTGTCAGC | 65 | A | 36 |
| 1380591 | 15635 | 15654 | N/A | N/A | GGCAGATTCACTCCCCCTGA | 38 | A | 37 |
| 1380602 | 19926 | 19945 | N/A | N/A | TGGCCTTATTGTTATATGGC | 115 | A | 38 |
| 1380607 | 17251 | 17270 | N/A | N/A | TGTCCTTACTCCAACTTTAT | 53 | A | 39 |
| 1380634 | 14050 | 14069 | N/A | N/A | CCATCTCTCAGTCCTCCAGG | 29 | A | 40 |
| 1380688 | 14238 | 14257 | N/A | N/A | GTTCTCATGTAGAATGTCCT | 37 | A | 41 |
| 1380696 | 22143 | 22162 | N/A | N/A | CACTTGGCACCTTTCCTTCC | 86 | A | 42 |
| 1380700 | 10713 | 10732 | N/A | N/A | CTTCCATAATTTAACACTCT | 23 | A | 43 |
| 1380751 | 22341 | 22360 | N/A | N/A | CACTAACACAACCTATGTCC | 95 | A | 44 |
| 1380767 | 15502 | 15521 | N/A | N/A | GGTAAGAGACCCCCCGCAAC | 71 | A | 45 |
| 1380776 | 16714 | 16733 | 943 | 962 | CTGTCCCAGGCCCACCGCCC | 163 | A | 46 |
| 1380808 | 22311 | 22330 | N/A | N/A | CAAAATCCCTCCAGCTCCCT | 97 | A | 47 |
| 1380816 | 20954 | 20973 | N/A | N/A | GCCAGGGACCACTGCCATCT | 70 | A | 48 |
| 1380842 | 14020 | 14039 | N/A | N/A | TAGTCCTACCCCTTATTTAC | 37 | A | 49 |
| 1380874 | 13978 | 13997 | N/A | N/A | AAGTCAAGGTCCTATGACTA | 139 | A | 50 |
| 1380895 | 9051 | 9070 | N/A | N/A | CACTAAGATTTCCCTGGCTT | 70 | A | 51 |
| 1380908 | 21467 | 21486 | N/A | N/A | CCTCCCTTGACATGTGACCG | 70 | A | 52 |
| 1380910 | 16699 | 16718 | 928 | 947 | CGCCCACAGCCTGCAGGATC | 73 | A | 53 |
| 1380967 | 24045 | 24064 | 2103 | 2122 | CCCCGGAGTCGAAGACAGTT | 128 | A | 54 |
| 1380973 | 19715 | 19734 | N/A | N/A | AATTTAAGGTCCTCCAACTC | 109 | A | 55 |
| 1381019 | 22325 | 22344 | N/A | N/A | GTCCCTCTGCTGCTCAAAAT | 79 | A | 56 |
| 1381038 | 17283 | 17302 | N/A | N/A | ATGAGTGATTCAGGACCCCA | 47 | A | 57 |
| 1381128 | 20888 | 20907 | N/A | N/A | TAATTTACTTGTGATAAGCA | 58 | A | 58 |
| 1381136 | 21366 | 21385 | N/A | N/A | ATGTGGTCCTAAGACTGGGC | 95 | A | 59 |
| 1381151 | 21053 | 21072 | N/A | N/A | AACTGTTCTCTTAGACAAAG | 83 | A | 60 |
| 1381218 | 24442 | 24461 | 2500 | 2519 | CTTTGCGAACCAACGATAGG | 120 | A | 61 |
| 1381229 | 17724 | 17743 | N/A | N/A | GTTGCTTCCCTTCAGGGCAC | 83 | A | 62 |
| 1381231 | 12150 | 12169 | 183 | 202 | GGACAGGCAGCACCATGGCC | 86 | A | 63 |
| 1381234 | 22262 | 22281 | N/A | N/A | GTTTTGTTTCCTGCTGGCCT | 48 | A | 64 |
| 1381256 | 17118 | 17137 | 1271 | 1290 | GTGGCACCTTCGAAATCCGG | 85 | A | 65 |
| 1381259 | 19859 | 19878 | N/A | N/A | ACTTCATATTTTCCAAGTTC | 45 | A | 66 |
| 1381267 | 24341 | 24360 | 2399 | 2418 | CTCAGCCTGGCCGAAAGAAA | 71 | A | 67 |
| 1381274 | 12772 | 12791 | N/A | N/A | CCTGCCTGTCGGCTGCGCCC | 63 | A | 68 |
| 1381290 | 24200 | 24219 | 2258 | 2277 | CGCGGACCCGGCCCCTCCCT | 166 | A | 69 |
| 1381293 | 13688 | 13707 | N/A | N/A | TGAGCCCTTTTAAGGCAGCA | 88 | A | 70 |
| 1381317 | 15193 | 15212 | 569 | 588 | CGGTCCCCATTCACCAACAC | 125 | A | 71 |
| 1381322 | 17152 | 17171 | 1305 | 1324 | CCCGTCCTCCACCAAGTCGA | 71 | A | 72 |
| 1381346 | 24394 | 24413 | 2452 | 2471 | CGGCCCGGCTTGCTGCCTTC | 94 | A | 73 |
| 1381369 | 19566 | 19585 | N/A | N/A | AGTGCTTACCTGAGGGCCAT | 100 | A | 74 |
| 1381373 | 24224 | 24243 | 2282 | 2301 | ACCCTTCGAGCCCCGTTCGC | 107 | A | 75 |
| 1381383 | 15979 | 15998 | 733 | 752 | TGGCCATGACAATCTCCGCC | 78 | A | 76 |
| 1381393 | 24512 | 24531 | 2570 | 2589 | CCGAGTAAGCAGGCAGAGAT | 63 | A | 77 |
| 1381398 | 17368 | 17387 | N/A | N/A | GCTCTGTGTTCCCCCACTGG | 62 | A | 78 |
| 1381407 | 12523 | 12542 | N/A | N/A | GCTGACCTTACTCTGCCCCT | 31 | A | 79 |
| 1381443 | 15938 | 15957 | 692 | 711 | GCCGGAATCCGCTCCCCAAA | 81 | A | 80 |
| 1381459 | 24083 | 24102 | 2141 | 2160 | TCTGTGCCGTGCCCCGGGCA | 87 | A | 81 |
| 1381475 | 17017 | 17036 | 1170 | 1189 | ACCCCGGCCCAGCCGTGTCT | 73 | A | 82 |
| 1381500 | 24617 | 24636 | 2675 | 2694 | CCAAACCGCCGAAGCGGGCG | 131 | A | 83 |
| 1381523 | 15075 | 15094 | N/A | N/A | CCCCTCACCTCGCCCCTCTT | 58 | A | 84 |
| 1381525 | 24241 | 24260 | 2299 | 2318 | CATTCCCGGCTACAAGGACC | 79 | A | 85 |
| 1381526 | 24376 | 24395 | 2434 | 2453 | TCCCAGGCCTGCAGTTTGCC | 126 | A | 86 |
| 1381535 | 22628 | 22647 | 1581 | 1600 | CTCGGCCTCAGCCTCTGCCG | 114 | A | 87 |
| 1381538 | 24137 | 24156 | 2195 | 2214 | GGGCGGAGACCCACGCTCGG | 100 | A | 88 |
| 1381541 | 17494 | 17513 | N/A | N/A | TCAGCTCAGATAGCTCCCCA | 113 | A | 89 |
| 1381549 | 14666 | 14685 | 376 | 395 | CCTCCTTAAGCCTCACCACG | 77 | A | 90 |
| 1381556 | 23676 | 23695 | N/A | N/A | GCGGCCTGTGTTGATTGGCT | 104 | A | 91 |
| 1381583 | 22885 | 22904 | 1733 | 1752 | TGTGCCTCTAGGTCCCGGTT | 16† | A | 92 |
| 1381656 | 15017 | 15036 | 472 | 491 | CCTGGCCCGTCTGCTTCATC | 85 | A | 93 |
| 1381666 | 13012 | 13031 | N/A | N/A | GCTGACCCACACGGCTCATA | 42 | A | 94 |
| 1381684 | 24532 | 24551 | 2590 | 2609 | GTTTGGCAAAAGCAAATTTC | 91 | A | 95 |
| 1052867 | 24729 | 24748 | 2787 | 2806 | CAGACAATAAATACCGAGGA | 20 | B | 96 |
| 1052873 | 19496 | 19515 | 1357 | 1376 | CTTCCCGAATGTCCGACAGT | 118 | B | 19 |
| 1052875 | 19498 | 19517 | 1359 | 1378 | ACCTTCCCGAATGTCCGACA | 54 | B | 97 |
| 1380281 | 15636 | 15655 | N/A | N/A | GGGCAGATTCACTCCCCCTG | 72 | B | 98 |
| 1380348 | 21370 | 21389 | N/A | N/A | ACAGATGTGGTCCTAAGACT | 60 | B | 99 |
| 1380353 | 17252 | 17271 | N/A | N/A | CTGTCCTTACTCCAACTTTA | 57 | B | 100 |
| 1380414 | 22328 | 22347 | N/A | N/A | TATGTCCCTCTGCTGCTCAA | 47 | B | 101 |
| 1380464 | 20890 | 20909 | N/A | N/A | TCTAATTTACTTGTGATAAG | 54 | B | 102 |
| 1380475 | 9688 | 9707 | N/A | N/A | TCAGGACTCTACGATTCCAA | 118 | B | 103 |
| 1380518 | 14534 | 14553 | N/A | N/A | TCAGCTTCACCCTAGGACTG | 45 | B | 104 |
| 1380521 | 21978 | 21997 | N/A | N/A | CTGCTTCTGTTCAGGAAGTC | 125 | B | 105 |
| 1380557 | 13979 | 13998 | N/A | N/A | GAAGTCAAGGTCCTATGACT | 90 | B | 106 |
| 1380564 | 14189 | 14208 | N/A | N/A | CAGTACCTCTAGATTCAGAT | 16 | B | 107 |
| 1380570 | 21469 | 21488 | N/A | N/A | CTCCTCCCTTGACATGTGAC | 49 | B | 108 |
| 1380595 | 22052 | 22071 | N/A | N/A | CTTACTTAATGCCCCACTGT | 82 | B | 109 |
| 1380618 | 16715 | 16734 | 944 | 963 | CCTGTCCCAGGCCCACCGCC | 79 | B | 110 |
| 1380623 | 19716 | 19735 | N/A | N/A | AAATTTAAGGTCCTCCAACT | 59 | B | 111 |
| 1380627 | 15921 | 15940 | 675 | 694 | AAACTTGCTCAGCAGTGTCA | 104 | B | 112 |
| 1380638 | 14051 | 14070 | N/A | N/A | CCCATCTCTCAGTCCTCCAG | 33 | B | 113 |
| 1380644 | 17119 | 17138 | 1272 | 1291 | GGTGGCACCTTCGAAATCCG | 130 | B | 114 |
| 1380656 | 10714 | 10733 | N/A | N/A | GCTTCCATAATTTAACACTC | 25 | B | 115 |
| 1380659 | 21097 | 21116 | N/A | N/A | AGTATGTGTAATGTTGTCCA | 1 | B | 116 |
| 1380670 | 19668 | 19687 | N/A | N/A | AACAGTAAGGTTCCAAGACT | 55 | B | 117 |
| 1380671 | 17700 | 17719 | N/A | N/A | CACACTCTCCATAATTCTCT | 106 | B | 118 |
| 1380680 | 22906 | 22925 | 1754 | 1773 | CGCTCCTGCAACTGCCGGAC | 87† | B | 119 |
| 1380691 | 17729 | 17748 | N/A | N/A | ATCCTGTTGCTTCCCTTCAG | 49 | B | 120 |
| 1380711 | 22144 | 22163 | N/A | N/A | CCACTTGGCACCTTTCCTTC | 61 | B | 121 |
| 1380713 | 21054 | 21073 | N/A | N/A | CAACTGTTCTCTTAGACAAA | 47 | B | 122 |
| 1380752 | 17284 | 17303 | N/A | N/A | AATGAGTGATTCAGGACCCC | 52 | B | 123 |
| 1380763 | 15504 | 15523 | N/A | N/A | CAGGTAAGAGACCCCCCGCA | 85 | B | 124 |
| 1380764 | 22312 | 22331 | N/A | N/A | TCAAAATCCCTCCAGCTCCC | 90 | B | 125 |
| 1380807 | 17609 | 17628 | N/A | N/A | GTTCAGCAAAAGGGCACCCA | 35 | B | 126 |
| 1380839 | 16700 | 16719 | 929 | 948 | CCGCCCACAGCCTGCAGGAT | 125 | B | 127 |
| 1380926 | 20955 | 20974 | N/A | N/A | AGCCAGGGACCACTGCCATC | 81 | B | 128 |
| 1380941 | 24459 | 24478 | 2517 | 2536 | CACAAGAAAGCTTTGCACTT | 82 | B | 129 |
| 1380979 | 19927 | 19946 | N/A | N/A | ATGGCCTTATTGTTATATGG | 73 | B | 130 |
| 1381082 | 13957 | 13976 | N/A | N/A | GAATGTTAAACTGGGCAGCC | 102 | B | 131 |
| 1381101 | 9053 | 9072 | N/A | N/A | GACACTAAGATTTCCCTGGC | 38 | B | 132 |
| 1381107 | 22343 | 22362 | N/A | N/A | AACACTAACACAACCTATGT | 95 | B | 133 |
| 1381138 | 19361 | 19380 | N/A | N/A | AAAGTGGCCCCTCCAGCATT | 47 | B | 134 |
| 1381158 | 22295 | 22314 | N/A | N/A | CCCTAATGCCCTCACGACAA | 106 | B | 135 |
| 1381167 | 24634 | 24653 | 2692 | 2711 | ACGAGGTCAATAAATATCCA | 54 | B | 136 |
| 1381224 | 22198 | 22217 | N/A | N/A | ACAAATCAGGATTCCCACCT | 89 | B | 137 |
| 1381243 | 24226 | 24245 | 2284 | 2303 | GGACCCTTCGAGCCCCGTTC | 80 | B | 138 |
| 1381265 | 12775 | 12794 | N/A | N/A | ACACCTGCCTGTCGGCTGCG | 66 | B | 139 |
| 1381287 | 14239 | 14258 | N/A | N/A | CGTTCTCATGTAGAATGTCC | 43 | B | 140 |
| 1381297 | 24517 | 24536 | 2575 | 2594 | ATTTCCCGAGTAAGCAGGCA | 74 | B | 141 |
| 1381313 | 24066 | 24085 | 2124 | 2143 | GCACTCAGTCTTCCAACGGG | 85 | B | 142 |
| 1381321 | 24242 | 24261 | 2300 | 2319 | GCATTCCCGGCTACAAGGAC | 90 | B | 143 |
| 1381332 | 20871 | 20890 | N/A | N/A | GCAATGCATTATTTGTGTAA | 8 | B | 144 |
| 1381347 | 24618 | 24637 | 2676 | 2695 | TCCAAACCGCCGAAGCGGGC | 86 | B | 145 |
| 1381350 | 13014 | 13033 | N/A | N/A | TGGCTGACCCACACGGCTCA | 133 | B | 146 |
| 1381360 | 17370 | 17389 | N/A | N/A | CTGCTCTGTGTTCCCCCACT | 69 | B | 147 |
| 1381370 | 24533 | 24552 | 2591 | 2610 | GGTTTGGCAAAAGCAAATTT | 113 | B | 148 |
| 1381379 | 17153 | 17172 | 1306 | 1325 | GCCCGTCCTCCACCAAGTCG | 77 | B | 149 |
| 1381411 | 15939 | 15958 | 693 | 712 | GGCCGGAATCCGCTCCCCAA | 72 | B | 150 |
| 1381412 | 15195 | 15214 | 571 | 590 | GCCGGTCCCCATTCACCAAC | 83 | B | 151 |
| 1381421 | 24138 | 24157 | 2196 | 2215 | TGGGCGGAGACCCACGCTCG | 105 | B | 152 |
| 1381424 | 19567 | 19586 | N/A | N/A | CAGTGCTTACCTGAGGGCCA | 102 | B | 153 |
| 1381434 | 15980 | 15999 | 734 | 753 | ATGGCCATGACAATCTCCGC | 94 | B | 154 |
| 1381445 | 22264 | 22283 | N/A | N/A | GGGTTTTGTTTCCTGCTGGC | 102 | B | 155 |
| 1381447 | 24343 | 24362 | 2401 | 2420 | GCCTCAGCCTGGCCGAAAGA | 93 | B | 156 |
| 1381467 | 24395 | 24414 | 2453 | 2472 | ACGGCCCGGCTTGCTGCCTT | 101 | B | 157 |
| 1381486 | 17496 | 17515 | N/A | N/A | TCTCAGCTCAGATAGCTCCC | 59 | B | 158 |
| 1381501 | 14021 | 14040 | N/A | N/A | TTAGTCCTACCCCTTATTTA | 43 | B | 159 |
| 1381513 | 19891 | 19910 | N/A | N/A | GCATTCTTTTACAACTGATT | 2 | B | 160 |
| 1381528 | 12151 | 12170 | 184 | 203 | TGGACAGGCAGCACCATGGC | 65 | B | 161 |
| 1381561 | 24201 | 24220 | 2259 | 2278 | CCGCGGACCCGGCCCCTCCC | 134 | B | 162 |
| 1381562 | 24379 | 24398 | 2437 | 2456 | CCTTCCCAGGCCTGCAGTTT | 103 | B | 163 |
| 1381567 | 14667 | 14686 | 377 | 396 | ACCTCCTTAAGCCTCACCAC | 93 | B | 164 |
| 1381595 | 15019 | 15038 | 474 | 493 | CACCTGGCCCGTCTGCTTCA | 79 | B | 165 |
| 1381607 | 22634 | 22653 | 1587 | 1606 | CGTCACCTCGGCCTCAGCCT | 179 | B | 166 |
| 1381610 | 24084 | 24103 | 2142 | 2161 | TTCTGTGCCGTGCCCCGGGC | 89 | B | 167 |
| 1381617 | 15076 | 15095 | N/A | N/A | GCCCCTCACCTCGCCCCTCT | 67 | B | 168 |
| 1381620 | 24443 | 24462 | 2501 | 2520 | ACTTTGCGAACCAACGATAG | 85 | B | 169 |
| 1381626 | 17021 | 17040 | 1174 | 1193 | CTCCACCCCGGCCCAGCCGT | 74 | B | 170 |
| 1381664 | 12524 | 12543 | N/A | N/A | TGCTGACCTTACTCTGCCCC | 39 | B | 171 |
| 1381672 | 23823 | 23842 | N/A | N/A | ATTGGCTCCTGGGACTCGCC | 99 | B | 172 |
| 1052868 | 24730 | 24749 | 2788 | 2807 | ACAGACAATAAATACCGAGG | 30 | C | 173 |
| 1052873 | 19496 | 19515 | 1357 | 1376 | CTTCCCGAATGTCCGACAGT | 61 | C | 19 |
| 1052876 | 19499 | 19518 | 1360 | 1379 | CACCTTCCCGAATGTCCGAC | 52 | C | 174 |
| 1380318 | 21055 | 21074 | N/A | N/A | CCAACTGTTCTCTTAGACAA | 44 | C | 175 |
| 1380319 | 22145 | 22164 | N/A | N/A | ACCACTTGGCACCTTTCCTT | 55 | C | 176 |
| 1380321 | 16716 | 16735 | 945 | 964 | GCCTGTCCCAGGCCCACCGC | 98 | C | 177 |
| 1380328 | 22296 | 22315 | N/A | N/A | TCCCTAATGCCCTCACGACA | 102 | C | 178 |
| 1380398 | 17701 | 17720 | N/A | N/A | CCACACTCTCCATAATTCTC | 44 | C | 179 |
| 1380430 | 20956 | 20975 | N/A | N/A | GAGCCAGGGACCACTGCCAT | 82 | C | 180 |
| 1380578 | 24380 | 24399 | 2438 | 2457 | GCCTTCCCAGGCCTGCAGTT | 82 | C | 181 |
| 1380586 | 17286 | 17305 | N/A | N/A | GGAATGAGTGATTCAGGACC | 20 | C | 182 |
| 1380631 | 14052 | 14071 | N/A | N/A | GCCCATCTCTCAGTCCTCCA | 39 | C | 183 |
| 1380651 | 22329 | 22348 | N/A | N/A | CTATGTCCCTCTGCTGCTCA | 40 | C | 184 |
| 1380655 | 22313 | 22332 | N/A | N/A | CTCAAAATCCCTCCAGCTCC | 117 | C | 185 |
| 1380716 | 9054 | 9073 | N/A | N/A | AGACACTAAGATTTCCCTGG | 33 | C | 186 |
| 1380724 | 17253 | 17272 | N/A | N/A | ACTGTCCTTACTCCAACTTT | 43 | C | 187 |
| 1380740 | 14190 | 14209 | N/A | N/A | CCAGTACCTCTAGATTCAGA | 16 | C | 188 |
| 1380775 | 19929 | 19948 | N/A | N/A | AAATGGCCTTATTGTTATAT | 61 | C | 189 |
| 1380780 | 15922 | 15941 | 676 | 695 | CAAACTTGCTCAGCAGTGTC | 88 | C | 190 |
| 1380782 | 14535 | 14554 | N/A | N/A | CTCAGCTTCACCCTAGGACT | 28 | C | 191 |
| 1380809 | 19669 | 19688 | N/A | N/A | AAACAGTAAGGTTCCAAGAC | 64 | C | 192 |
| 1380820 | 21979 | 21998 | N/A | N/A | TCTGCTTCTGTTCAGGAAGT | 134 | C | 193 |
| 1380845 | 17614 | 17633 | N/A | N/A | GTATTGTTCAGCAAAAGGGC | 43 | C | 194 |
| 1380855 | 9689 | 9708 | N/A | N/A | CTCAGGACTCTACGATTCCA | 45 | C | 195 |
| 1380873 | 17120 | 17139 | 1273 | 1292 | CGGTGGCACCTTCGAAATCC | 85 | C | 196 |
| 1380884 | 21376 | 21395 | N/A | N/A | ACCTCCACAGATGTGGTCCT | 77 | C | 197 |
| 1380951 | 22907 | 22926 | 1755 | 1774 | CCGCTCCTGCAACTGCCGGA | 90† | C | 198 |
| 1380957 | 21099 | 21118 | N/A | N/A | ATAGTATGTGTAATGTTGTC | 35 | C | 199 |
| 1380982 | 16701 | 16720 | 930 | 949 | ACCGCCCACAGCCTGCAGGA | 89 | C | 200 |
| 1381006 | 22053 | 22072 | N/A | N/A | CCTTACTTAATGCCCCACTG | 57 | C | 201 |
| 1381015 | 10715 | 10734 | N/A | N/A | GGCTTCCATAATTTAACACT | 21 | C | 202 |
| 1381022 | 19362 | 19381 | N/A | N/A | TAAAGTGGCCCCTCCAGCAT | 51 | C | 203 |
| 1381034 | 13980 | 13999 | N/A | N/A | AGAAGTCAAGGTCCTATGAC | 34 | C | 204 |
| 1381057 | 17730 | 17749 | N/A | N/A | TATCCTGTTGCTTCCCTTCA | 60 | C | 205 |
| 1381100 | 20891 | 20910 | N/A | N/A | TTCTAATTTACTTGTGATAA | 75 | C | 206 |
| 1381103 | 15637 | 15656 | N/A | N/A | TGGGCAGATTCACTCCCCCT | 67 | C | 207 |
| 1381108 | 14022 | 14041 | N/A | N/A | TTTAGTCCTACCCCTTATTT | 56 | C | 208 |
| 1381127 | 19718 | 19737 | N/A | N/A | GAAAATTTAAGGTCCTCCAA | 46 | C | 209 |
| 1381137 | 22199 | 22218 | N/A | N/A | AACAAATCAGGATTCCCACC | 95 | C | 210 |
| 1381189 | 15505 | 15524 | N/A | N/A | CCAGGTAAGAGACCCCCCGC | 90 | C | 211 |
| 1381203 | 13958 | 13977 | N/A | N/A | GGAATGTTAAACTGGGCAGC | 18 | C | 212 |
| 1381207 | 24444 | 24463 | 2502 | 2521 | CACTTTGCGAACCAACGATA | 54 | C | 213 |
| 1381245 | 12155 | 12174 | 188 | 207 | ATGTTGGACAGGCAGCACCA | 67 | C | 214 |
| 1381251 | 22266 | 22285 | N/A | N/A | CTGGGTTTTGTTTCCTGCTG | 43 | C | 215 |
| 1381254 | 12776 | 12795 | N/A | N/A | AACACCTGCCTGTCGGCTGC | 66 | C | 216 |
| 1381263 | 17154 | 17173 | 1307 | 1326 | AGCCCGTCCTCCACCAAGTC | 137 | C | 217 |
| 1381291 | 24520 | 24539 | 2578 | 2597 | CAAATTTCCCGAGTAAGCAG | 97 | C | 218 |
| 1381292 | 23890 | 23909 | 1948 | 1967 | CCTCCGATAGGCCAGGCCTA | 71 | C | 219 |
| 1381296 | 24243 | 24262 | 2301 | 2320 | AGCATTCCCGGCTACAAGGA | 64 | C | 220 |
| 1381311 | 15077 | 15096 | N/A | N/A | AGCCCCTCACCTCGCCCCTC | 122 | C | 221 |
| 1381324 | 22589 | 22608 | N/A | N/A | TGCCACTTCAGCCTGTGTAT | 201 | C | 222 |
| 1381331 | 24139 | 24158 | 2197 | 2216 | CTGGGCGGAGACCCACGCTC | 147 | C | 223 |
| 1381357 | 21588 | 21607 | N/A | N/A | CCTCCTCTGCTTAGGAAAAG | 80 | C | 224 |
| 1381361 | 15982 | 16001 | 736 | 755 | CTATGGCCATGACAATCTCC | 77 | C | 225 |
| 1381382 | 24345 | 24364 | 2403 | 2422 | GGGCCTCAGCCTGGCCGAAA | 84 | C | 226 |
| 1381388 | 24460 | 24479 | 2518 | 2537 | GCACAAGAAAGCTTTGCACT | 56 | C | 227 |
| 1381404 | 15021 | 15040 | 476 | 495 | TACACCTGGCCCGTCTGCTT | 96 | C | 228 |
| 1381414 | 17023 | 17042 | 1176 | 1195 | TGCTCCACCCCGGCCCAGCC | 145 | C | 229 |
| 1381415 | 14310 | 14329 | N/A | N/A | AAGACCCAGTTCTTCCACCT | 38 | C | 230 |
| 1381426 | 24635 | 24654 | 2693 | 2712 | GACGAGGTCAATAAATATCC | 57 | C | 231 |
| 1381429 | 15952 | 15971 | 706 | 725 | AGCGCGCCATCTCGGCCGGA | 95 | C | 232 |
| 1381435 | 20872 | 20891 | N/A | N/A | AGCAATGCATTATTTGTGTA | 13 | C | 233 |
| 1381454 | 24089 | 24108 | 2147 | 2166 | GCGGCTTCTGTGCCGTGCCC | 147 | C | 234 |
| 1381462 | 22675 | 22694 | 1628 | 1647 | GTGAGCACCTCCTCCTCCAG | 210 | C | 235 |
| 1381472 | 17371 | 17390 | N/A | N/A | ACTGCTCTGTGTTCCCCCAC | 49 | C | 236 |
| 1381494 | 13057 | 13076 | N/A | N/A | CAGGAGAACTAAAGGACGCA | 38 | C | 237 |
| 1381495 | 19568 | 19587 | N/A | N/A | GCAGTGCTTACCTGAGGGCC | 82 | C | 238 |
| 1381502 | 12736 | 12755 | N/A | N/A | GCTGGCCCTCCTGGCTTGCC | 158 | C | 239 |
| 1381510 | 14668 | 14687 | 378 | 397 | GACCTCCTTAAGCCTCACCA | 75 | C | 240 |
| 1381514 | 17509 | 17528 | N/A | N/A | TCATCCCTCCAAGTCTCAGC | 55 | C | 241 |
| 1381571 | 24396 | 24415 | 2454 | 2473 | GACGGCCCGGCTTGCTGCCT | 80 | C | 242 |
| 1381585 | 24227 | 24246 | 2285 | 2304 | AGGACCCTTCGAGCCCCGTT | 91 | C | 243 |
| 1381597 | 24202 | 24221 | 2260 | 2279 | GCCGCGGACCCGGCCCCTCC | 156 | C | 244 |
| 1381618 | 24620 | 24639 | 2678 | 2697 | TATCCAAACCGCCGAAGCGG | 88 | C | 245 |
| 1381629 | 24534 | 24553 | 2592 | 2611 | GGGTTTGGCAAAAGCAAATT | 88 | C | 246 |
| 1381640 | 15245 | 15264 | N/A | N/A | CACCAGGTAGTTCTCATCCT | 70 | C | 247 |
| 1381645 | 24068 | 24087 | 2126 | 2145 | GGGCACTCAGTCTTCCAACG | 68 | C | 248 |
| 1381668 | 19893 | 19912 | N/A | N/A | TTGCATTCTTTTACAACTGA | 5 | C | 249 |
| 1052869 | 24731 | 24750 | 2789 | 2808 | GACAGACAATAAATACCGAG | 43 | D | 250 |
| 1052873 | 19496 | 19515 | 1357 | 1376 | CTTCCCGAATGTCCGACAGT | 74 | D | 19 |
| 1380308 | 17156 | 17175 | 1309 | 1328 | TGAGCCCGTCCTCCACCAAG | 106 | D | 251 |
| 1380316 | 24636 | 24655 | 2694 | 2713 | GGACGAGGTCAATAAATATC | 71 | D | 252 |
| 1380331 | 15506 | 15525 | N/A | N/A | TCCAGGTAAGAGACCCCCCG | 88 | D | 253 |
| 1380343 | 19793 | 19812 | N/A | N/A | ACAAGATTCTGGGAAGCCCA | 41 | D | 254 |
| 1380356 | 20957 | 20976 | N/A | N/A | TGAGCCAGGGACCACTGCCA | 68 | D | 255 |
| 1380370 | 9055 | 9074 | N/A | N/A | GAGACACTAAGATTTCCCTG | 31 | D | 256 |
| 1380378 | 19500 | 19519 | 1361 | 1380 | GCACCTTCCCGAATGTCCGA | 35 | D | 257 |
| 1380389 | 17617 | 17636 | N/A | N/A | CCAGTATTGTTCAGCAAAAG | 41 | D | 258 |
| 1380416 | 17322 | 17341 | N/A | N/A | CCTCAGTAGTAGATGGGCAC | 51 | D | 259 |
| 1380485 | 13984 | 14003 | N/A | N/A | TCTCAGAAGTCAAGGTCCTA | 32 | D | 260 |
| 1380528 | 14053 | 14072 | N/A | N/A | AGCCCATCTCTCAGTCCTCC | 48 | D | 261 |
| 1380585 | 16720 | 16739 | 949 | 968 | AGCTGCCTGTCCCAGGCCCA | 91 | D | 262 |
| 1380601 | 17702 | 17721 | N/A | N/A | GCCACACTCTCCATAATTCT | 72 | D | 263 |
| 1380614 | 15638 | 15657 | N/A | N/A | CTGGGCAGATTCACTCCCCC | 79 | D | 264 |
| 1380615 | 19673 | 19692 | N/A | N/A | CCCAAAACAGTAAGGTTCCA | 52 | D | 265 |
| 1380643 | 22146 | 22165 | N/A | N/A | GACCACTTGGCACCTTTCCT | 48 | D | 266 |
| 1380662 | 20892 | 20911 | N/A | N/A | TTTCTAATTTACTTGTGATA | 66 | D | 267 |
| 1380683 | 14536 | 14555 | N/A | N/A | TCTCAGCTTCACCCTAGGAC | 23 | D | 268 |
| 1380725 | 21056 | 21075 | N/A | N/A | ACCAACTGTTCTCTTAGACA | 13 | D | 269 |
| 1380769 | 15923 | 15942 | 677 | 696 | CCAAACTTGCTCAGCAGTGT | 63 | D | 270 |
| 1380805 | N/A | N/A | 779 | 798 | GGTTTGATGTCCCTGTGCAC | 72 | D | 271 |
| 1380827 | 21981 | 22000 | N/A | N/A | TGTCTGCTTCTGTTCAGGAA | 74 | D | 272 |
| 1380828 | 13960 | 13979 | N/A | N/A | TAGGAATGTTAAACTGGGCA | 18 | D | 273 |
| 1380847 | 17731 | 17750 | N/A | N/A | GTATCCTGTTGCTTCCCTTC | 20 | D | 274 |
| 1380872 | 14191 | 14210 | N/A | N/A | TCCAGTACCTCTAGATTCAG | 25 | D | 275 |
| 1380881 | 17254 | 17273 | N/A | N/A | CACTGTCCTTACTCCAACTT | 56 | D | 276 |
| 1380890 | 19363 | 19382 | N/A | N/A | CTAAAGTGGCCCCTCCAGCA | 36 | D | 277 |
| 1380909 | 24445 | 24464 | 2503 | 2522 | GCACTTTGCGAACCAACGAT | 40 | D | 278 |
| 1380948 | 16702 | 16721 | 931 | 950 | CACCGCCCACAGCCTGCAGG | 87 | D | 279 |
| 1380981 | 22314 | 22333 | N/A | N/A | GCTCAAAATCCCTCCAGCTC | 64 | D | 280 |
| 1380990 | 21377 | 21396 | N/A | N/A | CACCTCCACAGATGTGGTCC | 91 | D | 281 |
| 1381027 | 22908 | 22927 | 1756 | 1775 | TCCGCTCCTGCAACTGCCGG | 96† | D | 282 |
| 1381028 | 22297 | 22316 | N/A | N/A | CTCCCTAATGCCCTCACGAC | 89 | D | 283 |
| 1381052 | 17121 | 17140 | 1274 | 1293 | TCGGTGGCACCTTCGAAATC | 81 | D | 284 |
| 1381076 | 24461 | 24480 | 2519 | 2538 | TGCACAAGAAAGCTTTGCAC | 76 | D | 285 |
| 1381090 | 22054 | 22073 | N/A | N/A | CCCTTACTTAATGCCCCACT | 87 | D | 286 |
| 1381097 | 9691 | 9710 | N/A | N/A | GACTCAGGACTCTACGATTC | 89 | D | 287 |
| 1381104 | 22201 | 22220 | N/A | N/A | GGAACAAATCAGGATTCCCA | 74† | D | 288 |
| 1381146 | 22330 | 22349 | N/A | N/A | CCTATGTCCCTCTGCTGCTC | 73 | D | 289 |
| 1381165 | 11701 | 11720 | N/A | N/A | CCGACAAGCTCCAGAACTGG | 47 | D | 290 |
| 1381178 | 20873 | 20892 | N/A | N/A | AAGCAATGCATTATTTGTGT | 16 | D | 291 |
| 1381217 | 21107 | 21126 | N/A | N/A | GATAAGGTATAGTATGTGTA | 15 | D | 292 |
| 1381255 | 14023 | 14042 | N/A | N/A | CTTTAGTCCTACCCCTTATT | 65 | D | 293 |
| 1381266 | 17530 | 17549 | N/A | N/A | GGAGGAGTCCTCTCCTGCTT | 78 | D | 294 |
| 1381285 | 20703 | 20722 | N/A | N/A | GCACGATTTTTTCAATTTTT | 15 | D | 295 |
| 1381305 | 24346 | 24365 | 2404 | 2423 | AGGGCCTCAGCCTGGCCGAA | 45 | D | 296 |
| 1381333 | 24228 | 24247 | 2286 | 2305 | AAGGACCCTTCGAGCCCCGT | 93 | D | 297 |
| 1381337 | 14313 | 14332 | N/A | N/A | AATAAGACCCAGTTCTTCCA | 43 | D | 298 |
| 1381354 | 24381 | 24400 | 2439 | 2458 | TGCCTTCCCAGGCCTGCAGT | 106 | D | 299 |
| 1381375 | 24535 | 24554 | 2593 | 2612 | CGGGTTTGGCAAAAGCAAAT | 70 | D | 300 |
| 1381378 | 12745 | 12764 | N/A | N/A | CTGCCCCATGCTGGCCCTCC | 61 | D | 301 |
| 1381395 | 12161 | 12180 | 194 | 213 | GCTGACATGTTGGACAGGCA | 140 | D | 302 |
| 1381413 | 24246 | 24265 | 2304 | 2323 | AGCAGCATTCCCGGCTACAA | 54 | D | 303 |
| 1381417 | 24090 | 24109 | 2148 | 2167 | CGCGGCTTCTGTGCCGTGCC | 80 | D | 304 |
| 1381432 | 22676 | 22695 | 1629 | 1648 | GGTGAGCACCTCCTCCTCCA | 100 | D | 305 |
| 1381437 | 24069 | 24088 | 2127 | 2146 | CGGGCACTCAGTCTTCCAAC | 88 | D | 306 |
| 1381438 | 19642 | 19661 | N/A | N/A | GCAACTCCATTGGCTGCCAA | 148 | D | 307 |
| 1381442 | 14669 | 14688 | 379 | 398 | GGACCTCCTTAAGCCTCACC | 82 | D | 308 |
| 1381457 | 13058 | 13077 | N/A | N/A | CCAGGAGAACTAAAGGACGC | 45 | D | 309 |
| 1381465 | 17053 | 17072 | 1206 | 1225 | AAAGAAGAAGGGATGTGTCC | 125 | D | 310 |
| 1381487 | 22590 | 22609 | N/A | N/A | CTGCCACTTCAGCCTGTGTA | 81 | D | 311 |
| 1381509 | 23892 | 23911 | 1950 | 1969 | CGCCTCCGATAGGCCAGGCC | 109 | D | 312 |
| 1381524 | 19894 | 19913 | N/A | N/A | TTTGCATTCTTTTACAACTG | 13 | D | 313 |
| 1381543 | 21666 | 21685 | N/A | N/A | GCTGCTTCCAAGACCTCCTG | 83 | D | 314 |
| 1381546 | 24140 | 24159 | 2198 | 2217 | GCTGGGCGGAGACCCACGCT | 70 | D | 315 |
| 1381566 | 15953 | 15972 | 707 | 726 | AAGCGCGCCATCTCGGCCGG | 77 | D | 316 |
| 1381574 | 24521 | 24540 | 2579 | 2598 | GCAAATTTCCCGAGTAAGCA | 61 | D | 317 |
| 1381600 | 24203 | 24222 | 2261 | 2280 | GGCCGCGGACCCGGCCCCTC | 114 | D | 318 |
| 1381614 | 15246 | 15265 | N/A | N/A | TCACCAGGTAGTTCTCATCC | 31 | D | 319 |
| 1381621 | 22267 | 22286 | N/A | N/A | GCTGGGTTTTGTTTCCTGCT | 88 | D | 320 |
| 1381638 | 17372 | 17391 | N/A | N/A | GACTGCTCTGTGTTCCCCCA | 38 | D | 321 |
| 1381643 | 24622 | 24641 | 2680 | 2699 | AATATCCAAACCGCCGAAGC | 67 | D | 322 |
| 1381651 | 15078 | 15097 | N/A | N/A | CAGCCCCTCACCTCGCCCCT | 91 | D | 323 |
| 1381674 | 15060 | 15079 | 515 | 534 | CTCTTCAGCATGTCCCACTT | 76 | D | 324 |
| 1381686 | 12777 | 12796 | N/A | N/A | GAACACCTGCCTGTCGGCTG | 152 | D | 325 |
| 1381687 | 24397 | 24416 | 2455 | 2474 | GGACGGCCCGGCTTGCTGCC | 78 | D | 326 |
| 1052873 | 19496 | 19515 | 1357 | 1376 | CTTCCCGAATGTCCGACAGT | 127 | E | 19 |
| 1380292 | 9056 | 9075 | N/A | N/A | TGAGACACTAAGATTTCCCT | 51 | E | 327 |
| 1380304 | 20875 | 20894 | N/A | N/A | ATAAGCAATGCATTATTTGT | 28 | E | 328 |
| 1380305 | 19674 | 19693 | N/A | N/A | GCCCAAAACAGTAAGGTTCC | 73 | E | 329 |
| 1380352 | 22298 | 22317 | N/A | N/A | GCTCCCTAATGCCCTCACGA | 84 | E | 330 |
| 1380364 | 17157 | 17176 | 1310 | 1329 | GTGAGCCCGTCCTCCACCAA | 99 | F | 331 |
| 1380371 | 22055 | 22074 | N/A | N/A | ACCCTTACTTAATGCCCCAC | 62 | E | 332 |
| 1380402 | 11703 | 11722 | N/A | N/A | TCCCGACAAGCTCCAGAACT | 64 | E | 333 |
| 1380436 | N/A | N/A | 780 | 799 | GGGTTTGATGTCCCTGTGCA | 77 | E | 334 |
| 1380438 | 21113 | 21132 | N/A | N/A | ATTAATGATAAGGTATAGTA | 94 | E | 335 |
| 1380448 | 17323 | 17342 | N/A | N/A | TCCTCAGTAGTAGATGGGCA | 68 | E | 336 |
| 1380469 | 17732 | 17751 | N/A | N/A | TGTATCCTGTTGCTTCCCTT | 31 | E | 337 |
| 1380490 | 17122 | 17141 | 1275 | 1294 | GTCGGTGGCACCTTCGAAAT | 59 | F | 338 |
| 1380498 | 22147 | 22166 | N/A | N/A | TGACCACTTGGCACCTTTCC | 105 | E | 339 |
| 1380520 | 21057 | 21076 | N/A | N/A | AACCAACTGTTCTCTTAGAC | 47 | E | 340 |
| 1380525 | 19364 | 19383 | N/A | N/A | TCTAAAGTGGCCCCTCCAGC | 64 | E | 341 |
| 1380580 | 15925 | 15944 | 679 | 698 | CCCCAAACTTGCTCAGCAGT | 113 | E | 342 |
| 1380590 | 16721 | 16740 | 950 | 969 | TAGCTGCCTGTCCCAGGCCC | 94 | E | 343 |
| 1380622 | 15507 | 15526 | N/A | N/A | TTCCAGGTAAGAGACCCCCC | 70 | E | 344 |
| 1380652 | 17255 | 17274 | N/A | N/A | GCACTGTCCTTACTCCAACT | 26 | E | 345 |
| 1380654 | 24153 | 24172 | 2211 | 2230 | TCACAGGACTGGAGCTGGGC | 77 | E | 346 |
| 1380669 | 20958 | 20977 | N/A | N/A | GTGAGCCAGGGACCACTGCC | 98 | E | 347 |
| 1380705 | 17703 | 17722 | N/A | N/A | TGCCACACTCTCCATAATTC | 98 | E | 348 |
| 1380717 | 16704 | 16723 | 933 | 952 | CCCACCGCCCACAGCCTGCA | 99 | E | 349 |
| 1380736 | 22315 | 22334 | N/A | N/A | TGCTCAAAATCCCTCCAGCT | 125 | E | 350 |
| 1380770 | 22331 | 22350 | N/A | N/A | ACCTATGTCCCTCTGCTGCT | 63 | E | 351 |
| 1380779 | 24637 | 24656 | 2695 | 2714 | AGGACGAGGTCAATAAATAT | 76 | E | 352 |
| 1380790 | 14522 | 14541 | N/A | N/A | TAGGACTGTCTGCTTCCCAG | 65 | E | 353 |
| 1380796 | 24446 | 24465 | 2504 | 2523 | TGCACTTTGCGAACCAACGA | 42 | E | 354 |
| 1380803 | 19795 | 19814 | N/A | N/A | TTACAAGATTCTGGGAAGCC | 7 | E | 355 |
| 1380837 | 17618 | 17637 | N/A | N/A | CCCAGTATTGTTCAGCAAAA | 85 | E | 356 |
| 1380843 | 10409 | 10428 | N/A | N/A | CCCCCAAATTTTGTGCAGGT | 53 | E | 357 |
| 1380850 | 19501 | 19520 | 1362 | 1381 | CGCACCTTCCCGAATGTCCG | 71 | E | 358 |
| 1380853 | 15640 | 15659 | N/A | N/A | CACTGGGCAGATTCACTCCC | 86 | E | 359 |
| 1380871 | 22227 | 22246 | N/A | N/A | GAATGATTCAGCCAAACTAC | 78 | E | 360 |
| 1380896 | 14054 | 14073 | N/A | N/A | CAGCCCATCTCTCAGTCCTC | 77 | E | 361 |
| 1380950 | 20922 | 20941 | N/A | N/A | AGATATCAACTTCCTTTTCC | 57 | E | 362 |
| 1380965 | 21982 | 22001 | N/A | N/A | CTGTCTGCTTCTGTTCAGGA | 56 | E | 363 |
| 1380968 | 13985 | 14004 | N/A | N/A | CTCTCAGAAGTCAAGGTCCT | 44 | E | 364 |
| 1380983 | 22909 | 22928 | 1757 | 1776 | ATCCGCTCCTGCAACTGCCG | 124† | E | 365 |
| 1380987 | 24732 | 24751 | 2790 | 2809 | GGACAGACAATAAATACCGA | 69 | E | 366 |
| 1381061 | 14192 | 14211 | N/A | N/A | ATCCAGTACCTCTAGATTCA | 24 | E | 367 |
| 1381078 | 13961 | 13980 | N/A | N/A | CTAGGAATGTTAAACTGGGC | 54 | E | 368 |
| 1381119 | 24382 | 24401 | 2440 | 2459 | CTGCCTTCCCAGGCCTGCAG | 109 | E | 369 |
| 1381168 | 21379 | 21398 | N/A | N/A | GCCACCTCCACAGATGTGGT | 118 | E | 370 |
| 1381230 | 19909 | 19928 | N/A | N/A | GGCTGATTCAAAGAATTTGC | 59 | E | 371 |
| 1381303 | 22591 | 22610 | N/A | N/A | ACTGCCACTTCAGCCTGTGT | 125 | E | 372 |
| 1381310 | 24070 | 24089 | 2128 | 2147 | CCGGGCACTCAGTCTTCCAA | 92 | E | 373 |
| 1381323 | 15248 | 15267 | N/A | N/A | GCTCACCAGGTAGTTCTCAT | 98 | E | 374 |
| 1381342 | 24247 | 24266 | 2305 | 2324 | CAGCAGCATTCCCGGCTACA | 67 | E | 375 |
| 1381351 | 15961 | 15980 | 715 | 734 | CCAGGTAGAAGCGCGCCATC | 83 | E | 376 |
| 1381376 | 21810 | 21829 | 1475 | 1494 | TCAAGCAGCTGCTCGGCCTC | 104 | E | 377 |
| 1381425 | 12164 | 12183 | 197 | 216 | TCGGCTGACATGTTGGACAG | 123 | E | 378 |
| 1381428 | 24091 | 24110 | 2149 | 2168 | GCGCGGCTTCTGTGCCGTGC | 112 | E | 379 |
| 1381433 | 14654 | 14673 | N/A | N/A | TCACCACGATGGGCTCCGCT | 93 | E | 380 |
| 1381444 | 24536 | 24555 | 2594 | 2613 | GCGGGTTTGGCAAAAGCAAA | 88 | E | 381 |
| 1381446 | 24204 | 24223 | 2262 | 2281 | CGGCCGCGGACCCGGCCCCT | 100 | E | 382 |
| 1381450 | 24462 | 24481 | 2520 | 2539 | ATGCACAAGAAAGCTTTGCA | 68 | E | 383 |
| 1381464 | 17059 | 17078 | 1212 | 1231 | GAGGCCAAAGAAGAAGGGAT | 69 | E | 384 |
| 1381482 | 20705 | 20724 | N/A | N/A | TGGCACGATTTTTTCAATTT | 61 | E | 385 |
| 1381493 | 13060 | 13079 | N/A | N/A | GGCCAGGAGAACTAAAGGAC | 91 | F | 386 |
| 1381499 | 15061 | 15080 | 516 | 535 | CCTCTTCAGCATGTCCCACT | 78 | E | 387 |
| 1381512 | 24522 | 24541 | 2580 | 2599 | AGCAAATTTCCCGAGTAAGC | 69 | E | 388 |
| 1381515 | 15082 | 15101 | N/A | N/A | CGCCCAGCCCCTCACCTCGC | 170 | E | 389 |
| 1381518 | 24623 | 24642 | 2681 | 2700 | AAATATCCAAACCGCCGAAG | 57 | E | 390 |
| 1381531 | 14670 | 14689 | 380 | 399 | CGGACCTCCTTAAGCCTCAC | 84 | E | 391 |
| 1381533 | 19644 | 19663 | N/A | N/A | CTGCAACTCCATTGGCTGCC | 92 | E | 392 |
| 1381581 | 12746 | 12765 | N/A | N/A | GCTGCCCCATGCTGGCCCTC | 66 | E | 393 |
| 1381602 | 17373 | 17392 | N/A | N/A | AGACTGCTCTGTGTTCCCCC | 62 | F | 394 |
| 1381605 | 24229 | 24248 | 2287 | 2306 | CAAGGACCCTTCGAGCCCCG | 127 | E | 395 |
| 1381612 | 22677 | 22696 | 1630 | 1649 | GGGTGAGCACCTCCTCCTCC | 141 | E | 396 |
| 1381634 | 23893 | 23912 | 1951 | 1970 | GCGCCTCCGATAGGCCAGGC | 77 | E | 397 |
| 1381647 | 17532 | 17551 | N/A | N/A | GAGGAGGAGTCCTCTCCTGC | 108 | E | 398 |
| 1381655 | 24398 | 24417 | 2456 | 2475 | CGGACGGCCCGGCTTGCTGC | 118 | E | 399 |
| 1381661 | 12779 | 12798 | N/A | N/A | CCGAACACCTGCCTGTCGGC | 141 | E | 400 |
| 1381665 | 22278 | 22297 | N/A | N/A | CAAAAGGCCTTGCTGGGTTT | 57 | E | 401 |
| 1381677 | 14024 | 14043 | N/A | N/A | GCTTTAGTCCTACCCCTTAT | 19 | E | 402 |
| 1381679 | 24347 | 24366 | 2405 | 2424 | CAGGGCCTCAGCCTGGCCGA | 72 | F | 403 |
| 1052873 | 19496 | 19515 | 1357 | 1376 | CTTCCCGAATGTCCGACAGT | 110 | F | 19 |
| 1380290 | 21115 | 21134 | N/A | N/A | TCATTAATGATAAGGTATAG | 56 | F | 404 |
| 1380334 | 21058 | 21077 | N/A | N/A | AAACCAACTGTTCTCTTAGA | 58 | F | 405 |
| 1380340 | 20959 | 20978 | N/A | N/A | TGTGAGCCAGGGACCACTGC | 94 | F | 406 |
| 1380347 | 15329 | 15348 | N/A | N/A | ATCCTAGAGCTTCCTCTCCC | 78 | F | 407 |
| 1380420 | 17619 | 17638 | N/A | N/A | CCCCAGTATTGTTCAGCAAA | 107 | F | 408 |
| 1380427 | 19676 | 19695 | N/A | N/A | GGGCCCAAAACAGTAAGGTT | 160 | F | 409 |
| 1380432 | 17734 | 17753 | N/A | N/A | CTTGTATCCTGTTGCTTCCC | 30 | F | 410 |
| 1380440 | 22148 | 22167 | N/A | N/A | CTGACCACTTGGCACCTTTC | 85 | F | 411 |
| 1380454 | 19796 | 19815 | N/A | N/A | GTTACAAGATTCTGGGAAGC | 22 | F | 412 |
| 1380466 | 13986 | 14005 | N/A | N/A | CCTCTCAGAAGTCAAGGTCC | 66 | F | 413 |
| 1380543 | 17704 | 17723 | N/A | N/A | CTGCCACACTCTCCATAATT | 95 | F | 414 |
| 1380547 | 21986 | 22005 | N/A | N/A | GTTTCTGTCTGCTTCTGTTC | 33 | F | 415 |
| 1380593 | 17256 | 17275 | N/A | N/A | GGCACTGTCCTTACTCCAAC | 39 | F | 416 |
| 1380609 | 14523 | 14542 | N/A | N/A | CTAGGACTGTCTGCTTCCCA | 63 | F | 417 |
| 1380621 | 13965 | 13984 | N/A | N/A | ATGACTAGGAATGTTAAACT | 53 | F | 418 |
| 1380645 | 24383 | 24402 | 2441 | 2460 | GCTGCCTTCCCAGGCCTGCA | 212 | F | 419 |
| 1380706 | 11704 | 11723 | N/A | N/A | CTCCCGACAAGCTCCAGAAC | 75 | F | 420 |
| 1380708 | 22910 | 22929 | 1758 | 1777 | CATCCGCTCCTGCAACTGCC | 169 | F | 421 |
| 1380723 | 19656 | 19675 | N/A | N/A | CCAAGACTGATCCTGCAACT | 41 | F | 422 |
| 1380731 | 10410 | 10429 | N/A | N/A | GCCCCCAAATTTTGTGCAGG | 65 | F | 423 |
| 1380750 | 19913 | 19932 | N/A | N/A | ATATGGCTGATTCAAAGAAT | 57 | F | 424 |
| 1380756 | 15508 | 15527 | N/A | N/A | ATTCCAGGTAAGAGACCCCC | 47 | F | 425 |
| 1380781 | 22316 | 22335 | N/A | N/A | CTGCTCAAAATCCCTCCAGC | 74 | F | 426 |
| 1380798 | 20923 | 20942 | N/A | N/A | GAGATATCAACTTCCTTTTC | 27 | F | 427 |
| 1380799 | 17123 | 17142 | 1276 | 1295 | TGTCGGTGGCACCTTCGAAA | 85 | F | 428 |
| 1380815 | 22056 | 22075 | N/A | N/A | CACCCTTACTTAATGCCCCA | 128 | F | 429 |
| 1380856 | 16705 | 16724 | 934 | 953 | GCCCACCGCCCACAGCCTGC | 83 | F | 430 |
| 1380867 | 22279 | 22298 | N/A | N/A | ACAAAAGGCCTTGCTGGGTT | 63 | F | 431 |
| 1380888 | 14055 | 14074 | N/A | N/A | CCAGCCCATCTCTCAGTCCT | 56 | F | 432 |
| 1380923 | 22299 | 22318 | N/A | N/A | AGCTCCCTAATGCCCTCACG | 91 | F | 433 |
| 1380940 | 19502 | 19521 | 1363 | 1382 | GCGCACCTTCCCGAATGTCC | 92 | F | 434 |
| 1380975 | 20877 | 20896 | N/A | N/A | TGATAAGCAATGCATTATTT | 65 | F | 435 |
| 1381031 | 15926 | 15945 | 680 | 699 | TCCCCAAACTTGCTCAGCAG | 89 | F | 436 |
| 1381037 | 24733 | 24752 | 2791 | 2810 | GGGACAGACAATAAATACCG | 57 | F | 437 |
| 1381048 | 22228 | 22247 | N/A | N/A | GGAATGATTCAGCCAAACTA | 47 | F | 438 |
| 1381050 | N/A | N/A | 781 | 800 | CGGGTTTGATGTCCCTGTGC | 90 | F | 439 |
| 1381056 | 17158 | 17177 | 1311 | 1330 | AGTGAGCCCGTCCTCCACCA | 67 | F | 440 |
| 1381085 | 22332 | 22351 | N/A | N/A | AACCTATGTCCCTCTGCTGC | 78 | F | 441 |
| 1381095 | 16722 | 16741 | 951 | 970 | GTAGCTGCCTGTCCCAGGCC | 124 | F | 442 |
| 1381099 | 17334 | 17353 | N/A | N/A | TCACTGCTGGGTCCTCAGTA | 88 | F | 443 |
| 1381123 | 17566 | 17585 | N/A | N/A | AGCTTGTTACACGGTGAAGA | 52 | F | 444 |
| 1381131 | 14193 | 14212 | N/A | N/A | TATCCAGTACCTCTAGATTC | 62 | F | 445 |
| 1381134 | 9057 | 9076 | N/A | N/A | CTGAGACACTAAGATTTCCC | 47 | F | 446 |
| 1381200 | 24447 | 24466 | 2505 | 2524 | TTGCACTTTGCGAACCAACG | 28 | F | 447 |
| 1381215 | 13470 | 13489 | N/A | N/A | AGGTTTTTCCAGAGGCTGAA | 13 | F | 448 |
| 1381219 | 19367 | 19386 | N/A | N/A | TTATCTAAAGTGGCCCCTCC | 85 | F | 449 |
| 1381238 | 24523 | 24542 | 2581 | 2600 | AAGCAAATTTCCCGAGTAAG | 62 | F | 450 |
| 1381276 | 17060 | 17079 | 1213 | 1232 | CGAGGCCAAAGAAGAAGGGA | 70 | F | 451 |
| 1381280 | 24403 | 24422 | 2461 | 2480 | GAACACGGACGGCCCGGCTT | 104 | F | 452 |
| 1381308 | 14656 | 14675 | 366 | 385 | CCTCACCACGATGGGCTCCG | 60 | F | 453 |
| 1381314 | 22592 | 22611 | N/A | N/A | AACTGCCACTTCAGCCTGTG | 175 | F | 454 |
| 1381325 | 24071 | 24090 | 2129 | 2148 | CCCGGGCACTCAGTCTTCCA | 110 | F | 455 |
| 1381328 | 24248 | 24267 | 2306 | 2325 | GCAGCAGCATTCCCGGCTAC | 78 | F | 456 |
| 1381330 | 23914 | 23933 | 1972 | 1991 | CGGCGAACAGGAGCAGGGAA | 121 | F | 457 |
| 1381336 | 24638 | 24657 | 2696 | 2715 | GAGGACGAGGTCAATAAATA | 56 | F | 458 |
| 1381338 | 24624 | 24643 | 2682 | 2701 | TAAATATCCAAACCGCCGAA | 99 | F | 459 |
| 1381340 | 17454 | 17473 | N/A | N/A | CCTTCCTTGCTGAGTCAGGA | 73 | F | 460 |
| 1381343 | 15752 | 15771 | N/A | N/A | CCCCAGCCCAGAGATAACCA | 127 | F | 461 |
| 1381389 | 15962 | 15981 | 716 | 735 | GCCAGGTAGAAGCGCGCCAT | 84 | F | 462 |
| 1381396 | 15083 | 15102 | N/A | N/A | CCGCCCAGCCCCTCACCTCG | 92 | F | 463 |
| 1381402 | 24463 | 24482 | 2521 | 2540 | CATGCACAAGAAAGCTTTGC | 97 | F | 464 |
| 1381418 | 14671 | 14690 | 381 | 400 | TCGGACCTCCTTAAGCCTCA | 44 | F | 465 |
| 1381478 | 12781 | 12800 | N/A | N/A | CGCCGAACACCTGCCTGTCG | 141 | F | 466 |
| 1381479 | 20717 | 20736 | N/A | N/A | GACCACCATGCCTGGCACGA | 100 | F | 467 |
| 1381480 | 21811 | 21830 | 1476 | 1495 | CTCAAGCAGCTGCTCGGCCT | 131 | F | 468 |
| 1381491 | 12165 | 12184 | 198 | 217 | CTCGGCTGACATGTTGGACA | 97 | F | 469 |
| 1381504 | 15062 | 15081 | 517 | 536 | CCCTCTTCAGCATGTCCCAC | 93 | F | 470 |
| 1381507 | 14026 | 14045 | N/A | N/A | GTGCTTTAGTCCTACCCCTT | 17 | F | 471 |
| 1381527 | 24538 | 24557 | 2596 | 2615 | AAGCGGGTTTGGCAAAAGCA | 89 | F | 472 |
| 1381572 | 21390 | 21409 | N/A | N/A | GCTTGGCTCTGGCCACCTCC | 121 | F | 473 |
| 1381577 | 24348 | 24367 | 2406 | 2425 | TCAGGGCCTCAGCCTGGCCG | 132 | F | 474 |
| 1381579 | 12747 | 12766 | N/A | N/A | AGCTGCCCCATGCTGGCCCT | 148 | F | 475 |
| 1381590 | 24230 | 24249 | 2288 | 2307 | ACAAGGACCCTTCGAGCCCC | 89 | F | 476 |
| 1381604 | 24093 | 24112 | 2151 | 2170 | GGGCGCGGCTTCTGTGCCGT | 97 | F | 477 |
| 1381670 | 24157 | 24176 | 2215 | 2234 | CGGATCACAGGACTGGAGCT | 46 | F | 478 |
| 1381675 | 22678 | 22697 | 1631 | 1650 | CGGGTGAGCACCTCCTCCTC | 249 | F | 479 |
| 1381685 | 24208 | 24227 | 2266 | 2285 | TCGCCGGCCGCGGACCCGGC | 114 | F | 480 |
| 1052873 | 19496 | 19515 | 1357 | 1376 | CTTCCCGAATGTCCGACAGT | 77 | G | 19 |
| 1380279 | 22284 | 22303 | N/A | N/A | TCACGACAAAAGGCCTTGCT | 61 | G | 481 |
| 1380294 | 20878 | 20897 | N/A | N/A | GTGATAAGCAATGCATTATT | 18 | G | 482 |
| 1380302 | 13987 | 14006 | N/A | N/A | GCCTCTCAGAAGTCAAGGTC | 71 | G | 483 |
| 1380310 | 17462 | 17481 | N/A | N/A | CTCCAGGACCTTCCTTGCTG | 85 | G | 484 |
| 1380314 | 21060 | 21079 | N/A | N/A | GAAAACCAACTGTTCTCTTA | 75 | G | 485 |
| 1380392 | 16706 | 16725 | 935 | 954 | GGCCCACCGCCCACAGCCTG | 80 | G | 486 |
| 1380401 | 22149 | 22168 | N/A | N/A | CCTGACCACTTGGCACCTTT | 78 | G | 487 |
| 1380404 | 17159 | 17178 | 1312 | 1331 | CAGTGAGCCCGTCCTCCACC | 110 | G | 488 |
| 1380417 | 17339 | 17358 | N/A | N/A | CTAGGTCACTGCTGGGTCCT | 85 | G | 489 |
| 1380421 | 13966 | 13985 | N/A | N/A | TATGACTAGGAATGTTAAAC | 63 | G | 490 |
| 1380519 | 15927 | 15946 | 681 | 700 | CTCCCCAAACTTGCTCAGCA | 65 | G | 491 |
| 1380545 | 20924 | 20943 | N/A | N/A | CGAGATATCAACTTCCTTTT | 29 | G | 492 |
| 1380568 | 22911 | 22930 | 1759 | 1778 | CCATCCGCTCCTGCAACTGC | 130 | G | 493 |
| 1380569 | 24659 | 24678 | 2717 | 2736 | CTGTAGCCTGTCAGCGAGTC | 71 | G | 494 |
| 1380573 | 14056 | 14075 | N/A | N/A | TCCAGCCCATCTCTCAGTCC | 58 | G | 495 |
| 1380600 | 10411 | 10430 | N/A | N/A | GGCCCCCAAATTTTGTGCAG | 69 | G | 496 |
| 1380608 | 17124 | 17143 | 1277 | 1296 | GTGTCGGTGGCACCTTCGAA | 51 | G | 497 |
| 1380625 | 17257 | 17276 | N/A | N/A | AGGCACTGTCCTTACTCCAA | 65 | G | 498 |
| 1380686 | 21987 | 22006 | N/A | N/A | GGTTTCTGTCTGCTTCTGTT | 8 | G | 499 |
| 1380697 | 11705 | 11724 | N/A | N/A | GCTCCCGACAAGCTCCAGAA | 42 | G | 500 |
| 1380703 | 22333 | 22352 | N/A | N/A | CAACCTATGTCCCTCTGCTG | 104 | G | 501 |
| 1380712 | 17705 | 17724 | N/A | N/A | CCTGCCACACTCTCCATAAT | 61 | G | 502 |
| 1380748 | 19915 | 19934 | N/A | N/A | TTATATGGCTGATTCAAAGA | 30 | G | 503 |
| 1380749 | 22058 | 22077 | N/A | N/A | CACACCCTTACTTAATGCCC | 97 | G | 504 |
| 1380753 | 24158 | 24177 | 2216 | 2235 | CCGGATCACAGGACTGGAGC | 69 | G | 505 |
| 1380777 | 19800 | 19819 | N/A | N/A | AATGGTTACAAGATTCTGGG | 11 | G | 506 |
| 1380783 | 20805 | 20824 | N/A | N/A | AATCTATCATGGCTCACTGA | 77 | G | 507 |
| 1380785 | 17568 | 17587 | N/A | N/A | ACAGCTTGTTACACGGTGAA | 25 | G | 508 |
| 1380868 | 14194 | 14213 | N/A | N/A | GTATCCAGTACCTCTAGATT | 12 | G | 509 |
| 1380875 | 9240 | 9259 | N/A | N/A | AGAAATAGATTCTGGTTCGA | 29 | G | 510 |
| 1380886 | 15331 | 15350 | N/A | N/A | CAATCCTAGAGCTTCCTCTC | 87 | G | 511 |
| 1380917 | 16723 | 16742 | 952 | 971 | CGTAGCTGCCTGTCCCAGGC | 86 | G | 512 |
| 1380934 | 22300 | 22319 | N/A | N/A | CAGCTCCCTAATGCCCTCAC | 130 | G | 513 |
| 1380954 | 21116 | 21135 | N/A | N/A | TTCATTAATGATAAGGTATA | 54 | G | 514 |
| 1381000 | 22229 | 22248 | N/A | N/A | AGGAATGATTCAGCCAAACT | 58 | G | 515 |
| 1381009 | 17620 | 17639 | N/A | N/A | TCCCCAGTATTGTTCAGCAA | 45 | G | 516 |
| 1381011 | 20982 | 21001 | N/A | N/A | ATTTAAACATGTGTCAGTAC | 36 | G | 517 |
| 1381121 | 15510 | 15529 | N/A | N/A | CCATTCCAGGTAAGAGACCC | 77 | G | 518 |
| 1381125 | 22317 | 22336 | N/A | N/A | GCTGCTCAAAATCCCTCCAG | 53 | G | 519 |
| 1381143 | 19503 | 19522 | 1364 | 1383 | GGCGCACCTTCCCGAATGTC | 74 | G | 520 |
| 1381156 | 13471 | 13490 | N/A | N/A | AAGGTTTTTCCAGAGGCTGA | 20 | G | 521 |
| 1381162 | 24384 | 24403 | 2442 | 2461 | TGCTGCCTTCCCAGGCCTGC | 94 | G | 522 |
| 1381175 | 12869 | 12888 | N/A | N/A | GTCTGCAAAGCTGGTTCTCC | 51 | G | 523 |
| 1381180 | 14524 | 14543 | N/A | N/A | CCTAGGACTGTCTGCTTCCC | 85 | G | 524 |
| 1381213 | 19368 | 19387 | N/A | N/A | CTTATCTAAAGTGGCCCCTC | 93 | G | 525 |
| 1381214 | 17735 | 17754 | N/A | N/A | TCTTGTATCCTGTTGCTTCC | 26 | G | 526 |
| 1381223 | 24448 | 24467 | 2506 | 2525 | TTTGCACTTTGCGAACCAAC | 28 | G | 527 |
| 1381228 | 12748 | 12767 | N/A | N/A | CAGCTGCCCCATGCTGGCCC | 100 | G | 528 |
| 1381235 | 19657 | 19676 | N/A | N/A | TCCAAGACTGATCCTGCAAC | 44 | G | 529 |
| 1381236 | 24350 | 24369 | 2408 | 2427 | CGTCAGGGCCTCAGCCTGGC | 102 | G | 530 |
| 1381239 | 21812 | 21831 | 1477 | 1496 | GCTCAAGCAGCTGCTCGGCC | 76 | G | 531 |
| 1381295 | 21391 | 21410 | N/A | N/A | TGCTTGGCTCTGGCCACCTC | 75 | G | 532 |
| 1381298 | 24249 | 24268 | 2307 | 2326 | AGCAGCAGCATTCCCGGCTA | 50 | G | 533 |
| 1381307 | 24231 | 24250 | 2289 | 2308 | TACAAGGACCCTTCGAGCCC | 80 | G | 534 |
| 1381319 | 24407 | 24426 | 2465 | 2484 | GATGGAACACGGACGGCCCG | 81 | G | 535 |
| 1381334 | 24524 | 24543 | 2582 | 2601 | AAAGCAAATTTCCCGAGTAA | 63 | G | 536 |
| 1381341 | 24212 | 24231 | 2270 | 2289 | CCGTTCGCCGGCCGCGGACC | 64 | G | 537 |
| 1381356 | 23948 | 23967 | 2006 | 2025 | ATGCAGCCCAGGGCGGCGGC | 105 | G | 538 |
| 1381368 | 24625 | 24644 | 2683 | 2702 | ATAAATATCCAAACCGCCGA | 79 | G | 539 |
| 1381377 | 24072 | 24091 | 2130 | 2149 | CCCCGGGCACTCAGTCTTCC | 91 | G | 540 |
| 1381399 | 22679 | 22698 | 1632 | 1651 | CCGGGTGAGCACCTCCTCCT | 148 | G | 541 |
| 1381431 | 15162 | 15181 | N/A | N/A | CACGGAAGCACGACACCTGC | 74 | G | 542 |
| 1381469 | 24548 | 24567 | 2606 | 2625 | ATCCCCGAAAAAGCGGGTTT | 70 | G | 543 |
| 1381483 | 22596 | 22615 | N/A | N/A | CTGGAACTGCCACTTCAGCC | 127 | G | 544 |
| 1381496 | 16300 | 16319 | N/A | N/A | TCGGGTTTGATGTCCCTGCA | 119 | G | 545 |
| 1381521 | 24773 | 24792 | 2831 | 2850 | GCCTTTTATTCGCGAGGGTC | 46 | G | 546 |
| 1381560 | 14672 | 14691 | 382 | 401 | GTCGGACCTCCTTAAGCCTC | 45 | G | 547 |
| 1381613 | 24464 | 24483 | 2522 | 2541 | TCATGCACAAGAAAGCTTTG | 62 | G | 548 |
| 1381616 | 19696 | 19715 | N/A | N/A | CTGGCCTCTTAGGAGTCTTT | 104 | G | 549 |
| 1381625 | 15963 | 15982 | 717 | 736 | CGCCAGGTAGAAGCGCGCCA | 84 | G | 550 |
| 1381627 | 17070 | 17089 | 1223 | 1242 | CCATCCCAGTCGAGGCCAAA | 71 | G | 551 |
| 1381632 | 15063 | 15082 | 518 | 537 | CCCCTCTTCAGCATGTCCCA | 71 | G | 552 |
| 1381639 | 14657 | 14676 | 367 | 386 | GCCTCACCACGATGGGCTCC | 80 | G | 553 |
| 1381644 | 15768 | 15787 | N/A | N/A | GGGCAGAGACCTGCAGCCCC | 107 | G | 554 |
| 1381646 | 12166 | 12185 | 199 | 218 | CCTCGGCTGACATGTTGGAC | 90 | G | 555 |
| 1381657 | 14027 | 14046 | N/A | N/A | AGTGCTTTAGTCCTACCCCT | 24 | G | 556 |
| 1381658 | 24095 | 24114 | 2153 | 2172 | GTGGGCGCGGCTTCTGTGCC | 102 | G | 557 |
| 1052873 | 19496 | 19515 | 1357 | 1376 | CTTCCCGAATGTCCGACAGT | 74 | H | 19 |
| 1380282 | 17706 | 17725 | N/A | N/A | ACCTGCCACACTCTCCATAA | 66 | H | 558 |
| 1380322 | 13472 | 13491 | N/A | N/A | GAAGGTTTTTCCAGAGGCTG | 21 | H | 559 |
| 1380324 | 22285 | 22304 | N/A | N/A | CTCACGACAAAAGGCCTTGC | 98 | H | 560 |
| 1380357 | 20984 | 21003 | N/A | N/A | CTATTTAAACATGTGTCAGT | 37 | H | 561 |
| 1380363 | 17464 | 17483 | N/A | N/A | CCCTCCAGGACCTTCCTTGC | 84 | H | 562 |
| 1380381 | 15928 | 15947 | 682 | 701 | GCTCCCCAAACTTGCTCAGC | 109 | H | 563 |
| 1380403 | 20880 | 20899 | N/A | N/A | TTGTGATAAGCAATGCATTA | 37 | H | 564 |
| 1380467 | 16707 | 16726 | 936 | 955 | AGGCCCACCGCCCACAGCCT | 90 | H | 565 |
| 1380500 | 11706 | 11725 | N/A | N/A | TGCTCCCGACAAGCTCCAGA | 49 | H | 566 |
| 1380508 | 19803 | 19822 | N/A | N/A | GTTAATGGTTACAAGATTCT | 36 | H | 567 |
| 1380526 | 13967 | 13986 | N/A | N/A | CTATGACTAGGAATGTTAAA | 61 | H | 568 |
| 1380527 | 22912 | 22931 | 1760 | 1779 | TCCATCCGCTCCTGCAACTG | 90 | H | 569 |
| 1380529 | 14525 | 14544 | N/A | N/A | CCCTAGGACTGTCTGCTTCC | 81 | H | 570 |
| 1380548 | 15166 | 15185 | 542 | 561 | TCCTCACGGAAGCACGACAC | 73 | H | 571 |
| 1380549 | 10412 | 10431 | N/A | N/A | GGGCCCCCAAATTTTGTGCA | 97 | H | 572 |
| 1380588 | 17569 | 17588 | N/A | N/A | GACAGCTTGTTACACGGTGA | 32 | H | 573 |
| 1380641 | 12871 | 12890 | N/A | N/A | CTGTCTGCAAAGCTGGTTCT | 80 | H | 574 |
| 1380647 | 17736 | 17755 | N/A | N/A | TTCTTGTATCCTGTTGCTTC | 26 | H | 575 |
| 1380693 | 21117 | 21136 | N/A | N/A | GTTCATTAATGATAAGGTAT | 4 | H | 576 |
| 1380709 | 24385 | 24404 | 2443 | 2462 | TTGCTGCCTTCCCAGGCCTG | 86 | H | 577 |
| 1380722 | 21062 | 21081 | N/A | N/A | TAGAAAACCAACTGTTCTCT | 65 | H | 578 |
| 1380746 | 19658 | 19677 | N/A | N/A | TTCCAAGACTGATCCTGCAA | 79 | H | 579 |
| 1380760 | 16725 | 16744 | 954 | 973 | CCCGTAGCTGCCTGTCCCAG | 131 | H | 580 |
| 1380761 | 22301 | 22320 | N/A | N/A | CCAGCTCCCTAATGCCCTCA | 66 | H | 581 |
| 1380802 | 17258 | 17277 | N/A | N/A | TAGGCACTGTCCTTACTCCA | 74 | H | 582 |
| 1380812 | 24626 | 24645 | 2684 | 2703 | AATAAATATCCAAACCGCCG | 69 | H | 583 |
| 1380824 | 22318 | 22337 | N/A | N/A | TGCTGCTCAAAATCCCTCCA | 71 | H | 584 |
| 1380846 | 19504 | 19523 | 1365 | 1384 | CGGCGCACCTTCCCGAATGT | 84 | H | 585 |
| 1380857 | 20925 | 20944 | N/A | N/A | ACGAGATATCAACTTCCTTT | 24 | H | 586 |
| 1380862 | 21990 | 22009 | N/A | N/A | CGTGGTTTCTGTCTGCTTCT | 31 | H | 587 |
| 1380870 | 19919 | 19938 | N/A | N/A | ATTGTTATATGGCTGATTCA | 26 | H | 588 |
| 1380876 | 17160 | 17179 | 1313 | 1332 | GCAGTGAGCCCGTCCTCCAC | 104 | H | 589 |
| 1380892 | 20807 | 20826 | N/A | N/A | GGAATCTATCATGGCTCACT | 12 | H | 590 |
| 1380920 | 9242 | 9261 | N/A | N/A | ACAGAAATAGATTCTGGTTC | 72 | H | 591 |
| 1380925 | 15512 | 15531 | N/A | N/A | TCCCATTCCAGGTAAGAGAC | 106 | H | 592 |
| 1380959 | 22230 | 22249 | N/A | N/A | CAGGAATGATTCAGCCAAAC | 48 | H | 593 |
| 1380971 | 19369 | 19388 | N/A | N/A | GCTTATCTAAAGTGGCCCCT | 102 | H | 594 |
| 1380989 | 22334 | 22353 | N/A | N/A | ACAACCTATGTCCCTCTGCT | 73 | H | 595 |
| 1381039 | 13988 | 14007 | N/A | N/A | GGCCTCTCAGAAGTCAAGGT | 79 | H | 596 |
| 1381046 | 15332 | 15351 | N/A | N/A | CCAATCCTAGAGCTTCCTCT | 72 | H | 597 |
| 1381054 | 24035 | 24054 | 2093 | 2112 | GAAGACAGTTCTAGGGTTCA | 53 | H | 598 |
| 1381068 | 24449 | 24468 | 2507 | 2526 | CTTTGCACTTTGCGAACCAA | 48 | H | 599 |
| 1381133 | 17340 | 17359 | N/A | N/A | TCTAGGTCACTGCTGGGTCC | 74 | H | 600 |
| 1381145 | 24660 | 24679 | 2718 | 2737 | CCTGTAGCCTGTCAGCGAGT | 63 | H | 601 |
| 1381159 | 17621 | 17640 | N/A | N/A | ATCCCCAGTATTGTTCAGCA | 27 | H | 602 |
| 1381170 | 14196 | 14215 | N/A | N/A | TTGTATCCAGTACCTCTAGA | 29 | H | 603 |
| 1381196 | 24113 | 24132 | 2171 | 2190 | GTTGTGAACTGGCAGGCGGT | 72 | H | 604 |
| 1381232 | 15005 | 15024 | 460 | 479 | GCTTCATCTTCACTACCGCT | 53 | H | 605 |
| 1381288 | 24213 | 24232 | 2271 | 2290 | CCCGTTCGCCGGCCGCGGAC | 119 | H | 606 |
| 1381306 | 24250 | 24269 | 2308 | 2327 | CAGCAGCAGCATTCCCGGCT | 58 | H | 607 |
| 1381316 | 21392 | 21411 | N/A | N/A | CTGCTTGGCTCTGGCCACCT | 90 | H | 608 |
| 1381326 | 24368 | 24387 | 2426 | 2445 | CTGCAGTTTGCCCATCCACG | 62 | H | 609 |
| 1381359 | 24465 | 24484 | 2523 | 2542 | GTCATGCACAAGAAAGCTTT | 93 | H | 610 |
| 1381362 | 12167 | 12186 | 200 | 219 | ACCTCGGCTGACATGTTGGA | 84 | H | 611 |
| 1381397 | 24549 | 24568 | 2607 | 2626 | GATCCCCGAAAAAGCGGGTT | 86 | H | 612 |
| 1381401 | 24774 | 24793 | 2832 | 2851 | GGCCTTTTATTCGCGAGGGT | 82 | H | 613 |
| 1381408 | 17071 | 17090 | 1224 | 1243 | ACCATCCCAGTCGAGGCCAA | 118 | H | 614 |
| 1381420 | 24160 | 24179 | 2218 | 2237 | GCCCGGATCACAGGACTGGA | 108 | H | 615 |
| 1381451 | 15769 | 15788 | N/A | N/A | TGGGCAGAGACCTGCAGCCC | 88 | H | 616 |
| 1381458 | 17140 | 17159 | 1293 | 1312 | CAAGTCGAAGTTGCATGTGT | 59 | H | 617 |
| 1381470 | 14028 | 14047 | N/A | N/A | GAGTGCTTTAGTCCTACCCC | 51 | H | 618 |
| 1381476 | 15964 | 15983 | 718 | 737 | CCGCCAGGTAGAAGCGCGCC | 73 | H | 619 |
| 1381492 | 22597 | 22616 | 1550 | 1569 | GCTGGAACTGCCACTTCAGC | 100 | H | 620 |
| 1381497 | 14057 | 14076 | N/A | N/A | GTCCAGCCCATCTCTCAGTC | 63 | H | 621 |
| 1381506 | 14658 | 14677 | 368 | 387 | AGCCTCACCACGATGGGCTC | 124 | H | 622 |
| 1381530 | 22085 | 22104 | N/A | N/A | TCGACTTCTCAGATCCCCAG | 56 | H | 623 |
| 1381537 | 19700 | 19719 | N/A | N/A | AACTCTGGCCTCTTAGGAGT | 92 | H | 624 |
| 1381553 | 24232 | 24251 | 2290 | 2309 | CTACAAGGACCCTTCGAGCC | 95 | H | 625 |
| 1381555 | 21816 | 21835 | 1481 | 1500 | TGTGGCTCAAGCAGCTGCTC | 109 | H | 626 |
| 1381558 | 24073 | 24092 | 2131 | 2150 | GCCCCGGGCACTCAGTCTTC | 74 | H | 627 |
| 1381565 | 16324 | 16343 | 806 | 825 | CCACAGCGGTCCAGCAGGAT | 90 | H | 628 |
| 1381568 | 24409 | 24428 | 2467 | 2486 | AGGATGGAACACGGACGGCC | 98 | H | 629 |
| 1381578 | 24525 | 24544 | 2583 | 2602 | AAAAGCAAATTTCCCGAGTA | 52 | H | 630 |
| 1381608 | 22681 | 22700 | 1634 | 1653 | TGCCGGGTGAGCACCTCCTC | 213 | H | 631 |
| 1381676 | 15064 | 15083 | 519 | 538 | GCCCCTCTTCAGCATGTCCC | 79 | H | 632 |
| 1381678 | 22150 | 22169 | N/A | N/A | GCCTGACCACTTGGCACCTT | 87 | H | 633 |
| 1381680 | 12749 | 12768 | N/A | N/A | GCAGCTGCCCCATGCTGGCC | 91 | H | 634 |
| 1052873 | 19496 | 19515 | 1357 | 1376 | CTTCCCGAATGTCCGACAGT | 91 | I | 19 |
| 1052886 | 24119 | 24138 | 2177 | 2196 | GGAGCGGTTGTGAACTGGCA | 37 | I | 635 |
| 1380285 | 13969 | 13988 | N/A | N/A | TCCTATGACTAGGAATGTTA | 61 | I | 636 |
| 1380345 | 14058 | 14077 | N/A | N/A | GGTCCAGCCCATCTCTCAGT | 23 | I | 637 |
| 1380351 | 17707 | 17726 | N/A | N/A | CACCTGCCACACTCTCCATA | 68 | I | 638 |
| 1380361 | 17599 | 17618 | N/A | N/A | AGGGCACCCAGAGCCGAGCA | 67 | I | 639 |
| 1380373 | 10684 | 10703 | N/A | N/A | CAGACAATAGCAAGGGCAGC | 38 | I | 640 |
| 1380376 | 15168 | 15187 | 544 | 563 | TCTCCTCACGGAAGCACGAC | 91 | I | 641 |
| 1380382 | 20881 | 20900 | N/A | N/A | CTTGTGATAAGCAATGCATT | 62 | I | 642 |
| 1380399 | 17465 | 17484 | N/A | N/A | GCCCTCCAGGACCTTCCTTG | 69 | I | 643 |
| 1380405 | 20926 | 20945 | N/A | N/A | CACGAGATATCAACTTCCTT | 14 | I | 644 |
| 1380426 | 9244 | 9263 | N/A | N/A | CAACAGAAATAGATTCTGGT | 63 | I | 645 |
| 1380439 | 17259 | 17278 | N/A | N/A | GTAGGCACTGTCCTTACTCC | 64 | I | 646 |
| 1380460 | 19920 | 19939 | N/A | N/A | TATTGTTATATGGCTGATTC | 21 | I | 647 |
| 1380473 | 22302 | 22321 | N/A | N/A | TCCAGCTCCCTAATGCCCTC | 88 | I | 648 |
| 1380495 | 17161 | 17180 | 1314 | 1333 | GGCAGTGAGCCCGTCCTCCA | 80 | I | 649 |
| 1380497 | 24163 | 24182 | 2221 | 2240 | CGGGCCCGGATCACAGGACT | 71 | I | 650 |
| 1380499 | 17341 | 17360 | N/A | N/A | GTCTAGGTCACTGCTGGGTC | 40 | I | 651 |
| 1380502 | 21118 | 21137 | N/A | N/A | AGTTCATTAATGATAAGGTA | 20 | I | 652 |
| 1380504 | 19370 | 19389 | N/A | N/A | GGCTTATCTAAAGTGGCCCC | 101 | I | 653 |
| 1380513 | 15333 | 15352 | N/A | N/A | CCCAATCCTAGAGCTTCCTC | 77 | I | 654 |
| 1380522 | 24036 | 24055 | 2094 | 2113 | CGAAGACAGTTCTAGGGTTC | 24 | I | 655 |
| 1380539 | 20808 | 20827 | N/A | N/A | TGGAATCTATCATGGCTCAC | 36 | I | 656 |
| 1380550 | 21991 | 22010 | N/A | N/A | CCGTGGTTTCTGTCTGCTTC | 29 | I | 657 |
| 1380555 | 22913 | 22932 | 1761 | 1780 | CTCCATCCGCTCCTGCAACT | 67 | I | 658 |
| 1380558 | 24662 | 24681 | 2720 | 2739 | GTCCTGTAGCCTGTCAGCGA | 64 | I | 659 |
| 1380575 | 22286 | 22305 | N/A | N/A | CCTCACGACAAAAGGCCTTG | 46 | I | 660 |
| 1380599 | 22151 | 22170 | N/A | N/A | CGCCTGACCACTTGGCACCT | 88 | I | 661 |
| 1380648 | 15929 | 15948 | 683 | 702 | CGCTCCCCAAACTTGCTCAG | 107 | I | 662 |
| 1380664 | 16726 | 16745 | 955 | 974 | GCCCGTAGCTGCCTGTCCCA | 63 | I | 663 |
| 1380668 | 22231 | 22250 | N/A | N/A | TCAGGAATGATTCAGCCAAA | 30 | I | 664 |
| 1380690 | 17737 | 17756 | N/A | N/A | TTTCTTGTATCCTGTTGCTT | 43 | I | 665 |
| 1380710 | 14526 | 14545 | N/A | N/A | ACCCTAGGACTGTCTGCTTC | 69 | I | 666 |
| 1380718 | 24450 | 24469 | 2508 | 2527 | GCTTTGCACTTTGCGAACCA | 60 | I | 667 |
| 1380737 | 22335 | 22354 | N/A | N/A | CACAACCTATGTCCCTCTGC | 65 | I | 668 |
| 1380741 | 16708 | 16727 | 937 | 956 | CAGGCCCACCGCCCACAGCC | 63 | I | 669 |
| 1380765 | 13473 | 13492 | N/A | N/A | AGAAGGTTTTTCCAGAGGCT | 4 | I | 670 |
| 1380766 | 24386 | 24405 | 2444 | 2463 | CTTGCTGCCTTCCCAGGCCT | 87 | I | 671 |
| 1380774 | 19505 | 19524 | 1366 | 1385 | GCGGCGCACCTTCCCGAATG | 68 | I | 672 |
| 1380830 | 19804 | 19823 | N/A | N/A | AGTTAATGGTTACAAGATTC | 31 | I | 673 |
| 1380900 | 15621 | 15640 | N/A | N/A | CCCTGAGATGTTCTGGGAAA | 86 | I | 674 |
| 1380907 | 15882 | 15901 | N/A | N/A | ATACTCCATGACCAGGTACT | 86 | I | 675 |
| 1380944 | 14012 | 14031 | N/A | N/A | CCCCTTATTTACAGATGACA | 50 | I | 676 |
| 1380969 | 19659 | 19678 | N/A | N/A | GTTCCAAGACTGATCCTGCA | 78 | I | 677 |
| 1380986 | 12872 | 12891 | N/A | N/A | CCTGTCTGCAAAGCTGGTTC | 83 | I | 678 |
| 1381010 | 21063 | 21082 | N/A | N/A | CTAGAAAACCAACTGTTCTC | 90 | I | 679 |
| 1381111 | 21045 | 21064 | N/A | N/A | TCTTAGACAAAGTAGCATGA | 53 | I | 680 |
| 1381112 | 11708 | 11727 | N/A | N/A | CTTGCTCCCGACAAGCTCCA | 44 | I | 681 |
| 1381192 | 17624 | 17643 | N/A | N/A | TGGATCCCCAGTATTGTTCA | 46 | I | 682 |
| 1381209 | 22319 | 22338 | N/A | N/A | CTGCTGCTCAAAATCCCTCC | 60 | I | 683 |
| 1381252 | 24466 | 24485 | 2524 | 2543 | CGTCATGCACAAGAAAGCTT | 52 | I | 684 |
| 1381257 | 15972 | 15991 | 726 | 745 | GACAATCTCCGCCAGGTAGA | 46 | I | 685 |
| 1381260 | 12750 | 12769 | N/A | N/A | GGCAGCTGCCCCATGCTGGC | 96 | I | 686 |
| 1381271 | 21817 | 21836 | 1482 | 1501 | GTGTGGCTCAAGCAGCTGCT | 36 | I | 687 |
| 1381277 | 24369 | 24388 | 2427 | 2446 | CCTGCAGTTTGCCCATCCAC | 82 | I | 688 |
| 1381286 | 15065 | 15084 | 520 | 539 | CGCCCCTCTTCAGCATGTCC | 78 | I | 689 |
| 1381304 | 12170 | 12189 | 203 | 222 | CGCACCTCGGCTGACATGTT | 89 | I | 690 |
| 1381320 | 14197 | 14216 | N/A | N/A | GTTGTATCCAGTACCTCTAG | 17 | I | 691 |
| 1381363 | 14029 | 14048 | N/A | N/A | GGAGTGCTTTAGTCCTACCC | 39 | I | 692 |
| 1381372 | 24074 | 24093 | 2132 | 2151 | TGCCCCGGGCACTCAGTCTT | 112 | I | 693 |
| 1381427 | 22870 | 22889 | 1718 | 1737 | CGGTTCCGAGCCTCTGCCTC | 12† | I | 694 |
| 1381448 | 24233 | 24252 | 2291 | 2310 | GCTACAAGGACCCTTCGAGC | 118 | I | 695 |
| 1381456 | 22121 | 22140 | N/A | N/A | GGCTTGTTTCTCCTTCACCA | 16 | I | 696 |
| 1381461 | 15008 | 15027 | 463 | 482 | TCTGCTTCATCTTCACTACC | 94 | I | 697 |
| 1381471 | 24217 | 24236 | 2275 | 2294 | GAGCCCCGTTCGCCGGCCGC | 111 | I | 698 |
| 1381544 | 24410 | 24429 | 2468 | 2487 | GAGGATGGAACACGGACGGC | 79 | I | 699 |
| 1381548 | 16332 | 16351 | 814 | 833 | GGATGTGGCCACAGCGGTCC | 102 | I | 700 |
| 1381552 | 24550 | 24569 | 2608 | 2627 | GGATCCCCGAAAAAGCGGGT | 110 | I | 701 |
| 1381580 | 14660 | 14679 | 370 | 389 | TAAGCCTCACCACGATGGGC | 89 | I | 702 |
| 1381592 | 24776 | 24795 | 2834 | 2853 | AGGGCCTTTTATTCGCGAGG | 47 | I | 703 |
| 1381596 | 24627 | 24646 | 2685 | 2704 | CAATAAATATCCAAACCGCC | 70 | I | 704 |
| 1381624 | 24251 | 24270 | 2309 | 2328 | GCAGCAGCAGCATTCCCGGC | 40 | I | 705 |
| 1381637 | 19705 | 19724 | N/A | N/A | CCTCCAACTCTGGCCTCTTA | 69 | I | 706 |
| 1381642 | 17144 | 17163 | 1297 | 1316 | CCACCAAGTCGAAGTTGCAT | 62 | I | 707 |
| 1381650 | 22601 | 22620 | 1554 | 1573 | AGCCGCTGGAACTGCCACTT | 43 | I | 708 |
| 1381654 | 21396 | 21415 | N/A | N/A | GAGACTGCTTGGCTCTGGCC | 74 | I | 709 |
| 1381669 | 24526 | 24545 | 2584 | 2603 | CAAAAGCAAATTTCCCGAGT | 68 | I | 710 |
| 1381673 | 17073 | 17092 | 1226 | 1245 | AGACCATCCCAGTCGAGGCC | 85 | I | 711 |
| 1052873 | 19496 | 19515 | 1357 | 1376 | CTTCCCGAATGTCCGACAGT | 88 | J | 19 |
| 1380286 | 17738 | 17757 | N/A | N/A | TTTTCTTGTATCCTGTTGCT | 24 | J | 712 |
| 1380288 | 17601 | 17620 | N/A | N/A | AAAGGGCACCCAGAGCCGAG | 96 | J | 713 |
| 1380295 | 10686 | 10705 | N/A | N/A | CACAGACAATAGCAAGGGCA | 29 | J | 714 |
| 1380313 | 16709 | 16728 | 938 | 957 | CCAGGCCCACCGCCCACAGC | 78 | J | 715 |
| 1380320 | 20809 | 20828 | N/A | N/A | CTGGAATCTATCATGGCTCA | 19 | J | 716 |
| 1380337 | 22336 | 22355 | N/A | N/A | ACACAACCTATGTCCCTCTG | 48 | J | 717 |
| 1380349 | 17162 | 17181 | 1315 | 1334 | TGGCAGTGAGCCCGTCCTCC | 114 | J | 718 |
| 1380350 | 24387 | 24406 | 2445 | 2464 | GCTTGCTGCCTTCCCAGGCC | 113 | J | 719 |
| 1380368 | 15622 | 15641 | N/A | N/A | CCCCTGAGATGTTCTGGGAA | 94 | J | 720 |
| 1380446 | 17342 | 17361 | N/A | N/A | AGTCTAGGTCACTGCTGGGT | 30 | J | 721 |
| 1380478 | 15334 | 15353 | N/A | N/A | CCCCAATCCTAGAGCTTCCT | 111 | J | 722 |
| 1380484 | 19506 | 19525 | 1367 | 1386 | AGCGGCGCACCTTCCCGAAT | 73 | J | 723 |
| 1380489 | 21119 | 21138 | N/A | N/A | GAGTTCATTAATGATAAGGT | 2 | J | 724 |
| 1380541 | 24451 | 24470 | 2509 | 2528 | AGCTTTGCACTTTGCGAACC | 53 | J | 725 |
| 1380552 | 22232 | 22251 | N/A | N/A | CTCAGGAATGATTCAGCCAA | 55 | J | 726 |
| 1380605 | 21459 | 21478 | N/A | N/A | GACATGTGACCGCTGCAGAC | 29 | J | 727 |
| 1380674 | 21992 | 22011 | N/A | N/A | TCCGTGGTTTCTGTCTGCTT | 33 | J | 728 |
| 1380684 | 24037 | 24056 | 2095 | 2114 | TCGAAGACAGTTCTAGGGTT | 36 | J | 729 |
| 1380689 | 22303 | 22322 | N/A | N/A | CTCCAGCTCCCTAATGCCCT | 79 | J | 730 |
| 1380754 | 17260 | 17279 | N/A | N/A | GGTAGGCACTGTCCTTACTC | 80 | J | 731 |
| 1380755 | 14527 | 14546 | N/A | N/A | CACCCTAGGACTGTCTGCTT | 69 | J | 732 |
| 1380757 | 22287 | 22306 | N/A | N/A | CCCTCACGACAAAAGGCCTT | 96 | J | 733 |
| 1380762 | 21064 | 21083 | N/A | N/A | ACTAGAAAACCAACTGTTCT | 89 | J | 734 |
| 1380772 | 12873 | 12892 | N/A | N/A | GCCTGTCTGCAAAGCTGGTT | 82 | J | 735 |
| 1380789 | 15930 | 15949 | 684 | 703 | CCGCTCCCCAAACTTGCTCA | 96 | J | 736 |
| 1380791 | 13474 | 13493 | N/A | N/A | GAGAAGGTTTTTCCAGAGGC | 12 | J | 737 |
| 1380814 | 13970 | 13989 | N/A | N/A | GTCCTATGACTAGGAATGTT | 52 | J | 738 |
| 1380829 | 19371 | 19390 | N/A | N/A | GGGCTTATCTAAAGTGGCCC | 120 | J | 739 |
| 1380883 | 22320 | 22339 | N/A | N/A | TCTGCTGCTCAAAATCCCTC | 74 | J | 740 |
| 1380937 | 19660 | 19679 | N/A | N/A | GGTTCCAAGACTGATCCTGC | 64 | J | 741 |
| 1380946 | 11709 | 11728 | N/A | N/A | CCTTGCTCCCGACAAGCTCC | 85 | J | 742 |
| 1380949 | 22914 | 22933 | 1762 | 1781 | ACTCCATCCGCTCCTGCAAC | 65 | J | 743 |
| 1380958 | 9681 | 9700 | N/A | N/A | TCTACGATTCCAAAACTGAG | 85 | J | 744 |
| 1380960 | 24702 | 24721 | 2760 | 2779 | GGTCTCAGTGCATCCAAAAC | 64 | J | 745 |
| 1380961 | 17708 | 17727 | N/A | N/A | GCACCTGCCACACTCTCCAT | 95 | J | 746 |
| 1380963 | 19805 | 19824 | N/A | N/A | AAGTTAATGGTTACAAGATT | 45 | J | 747 |
| 1380977 | 20882 | 20901 | N/A | N/A | ACTTGTGATAAGCAATGCAT | 33 | J | 748 |
| 1381007 | 19709 | 19728 | N/A | N/A | AGGTCCTCCAACTCTGGCCT | 74 | J | 749 |
| 1381012 | 15883 | 15902 | 637 | 656 | AATACTCCATGACCAGGTAC | 61 | J | 750 |
| 1381045 | 20927 | 20946 | N/A | N/A | TCACGAGATATCAACTTCCT | 58 | J | 751 |
| 1381047 | 21047 | 21066 | N/A | N/A | TCTCTTAGACAAAGTAGCAT | 39 | J | 752 |
| 1381077 | 17466 | 17485 | N/A | N/A | AGCCCTCCAGGACCTTCCTT | 119 | J | 753 |
| 1381080 | 14015 | 14034 | N/A | N/A | CTACCCCTTATTTACAGATG | 36 | J | 754 |
| 1381153 | 19921 | 19940 | N/A | N/A | TTATTGTTATATGGCTGATT | 11 | J | 755 |
| 1381174 | 15169 | 15188 | 545 | 564 | CTCTCCTCACGGAAGCACGA | 96 | J | 756 |
| 1381211 | 24628 | 24647 | 2686 | 2705 | TCAATAAATATCCAAACCGC | 72 | J | 757 |
| 1381242 | 24235 | 24254 | 2293 | 2312 | CGGCTACAAGGACCCTTCGA | 85 | J | 758 |
| 1381244 | 14198 | 14217 | N/A | N/A | GGTTGTATCCAGTACCTCTA | 52 | J | 759 |
| 1381250 | 24413 | 24432 | 2471 | 2490 | GTGGAGGATGGAACACGGAC | 56 | J | 760 |
| 1381284 | 21875 | 21894 | N/A | N/A | ACCAACTTACTGTTTCATCC | 92 | J | 761 |
| 1381301 | 22158 | 22177 | N/A | N/A | AGGCTCTCGCCTGACCACTT | 92 | J | 762 |
| 1381315 | 24130 | 24149 | 2188 | 2207 | GACCCACGCTCGGAGCGGTT | 103 | J | 763 |
| 1381348 | 15974 | 15993 | 728 | 747 | ATGACAATCTCCGCCAGGTA | 83 | J | 764 |
| 1381355 | 12171 | 12190 | 204 | 223 | CCGCACCTCGGCTGACATGT | 96 | J | 765 |
| 1381365 | 14030 | 14049 | N/A | N/A | AGGAGTGCTTTAGTCCTACC | 54 | J | 766 |
| 1381366 | 24331 | 24350 | 2389 | 2408 | CCGAAAGAAAGAAATGGTCT | 59 | J | 767 |
| 1381403 | 16333 | 16352 | 815 | 834 | CGGATGTGGCCACAGCGGTC | 96 | J | 768 |
| 1381410 | 12753 | 12772 | N/A | N/A | CCTGGCAGCTGCCCCATGCT | 116 | J | 769 |
| 1381436 | 24527 | 24546 | 2585 | 2604 | GCAAAAGCAAATTTCCCGAG | 59 | J | 770 |
| 1381441 | 24219 | 24238 | 2277 | 2296 | TCGAGCCCCGTTCGCCGGCC | 112 | J | 771 |
| 1381455 | 24370 | 24389 | 2428 | 2447 | GCCTGCAGTTTGCCCATCCA | 93 | J | 772 |
| 1381466 | 24552 | 24571 | 2610 | 2629 | CGGGATCCCCGAAAAAGCGG | 89 | J | 773 |
| 1381481 | 15010 | 15029 | 465 | 484 | CGTCTGCTTCATCTTCACTA | 87 | J | 774 |
| 1381498 | 17074 | 17093 | 1227 | 1246 | GAGACCATCCCAGTCGAGGC | 63 | J | 775 |
| 1381517 | 24164 | 24183 | 2222 | 2241 | GCGGGCCCGGATCACAGGAC | 98 | J | 776 |
| 1381536 | 22125 | 22144 | N/A | N/A | CCATGGCTTGTTTCTCCTTC | 96 | J | 777 |
| 1381542 | 22610 | 22629 | 1563 | 1582 | CGCAGGGACAGCCGCTGGAA | 95 | J | 778 |
| 1381545 | 22871 | 22890 | 1719 | 1738 | CCGGTTCCGAGCCTCTGCCT | 9† | J | 779 |
| 1381547 | 24777 | 24796 | 2835 | 2854 | GAGGGCCTTTTATTCGCGAG | 93 | J | 780 |
| 1381575 | 17146 | 17165 | 1299 | 1318 | CTCCACCAAGTCGAAGTTGC | 81 | J | 781 |
| 1381576 | 14661 | 14680 | 371 | 390 | TTAAGCCTCACCACGATGGG | 72 | J | 782 |
| 1381609 | 14165 | 14184 | N/A | N/A | GTGGTTCTTGAACCACACTT | 86 | J | 783 |
| 1381615 | 16845 | 16864 | N/A | N/A | GCTCACCTTGTAGTGGACGA | 104 | J | 784 |
| 1381636 | 24075 | 24094 | 2133 | 2152 | GTGCCCCGGGCACTCAGTCT | 50 | J | 785 |
| 1381653 | 24484 | 24503 | 2542 | 2561 | ACGCTCCCCAGAGCAGGGCG | 112 | J | 786 |
| 1381667 | 15066 | 15085 | 521 | 540 | TCGCCCCTCTTCAGCATGTC | 62 | J | 787 |
| 1381681 | 17693 | 17712 | N/A | N/A | TCCATAATTCTCTAATTCTC | 60 | J | 788 |
| 1052873 | 19496 | 19515 | 1357 | 1376 | CTTCCCGAATGTCCGACAGT | 73 | K | 19 |
| 1380289 | 19922 | 19941 | N/A | N/A | CTTATTGTTATATGGCTGAT | 5 | K | 789 |
| 1380300 | 24388 | 24407 | 2446 | 2465 | GGCTTGCTGCCTTCCCAGGC | 148 | K | 790 |
| 1380311 | 17350 | 17369 | N/A | N/A | GGACTGTAAGTCTAGGTCAC | 138 | K | 791 |
| 1380342 | 20810 | 20829 | N/A | N/A | GCTGGAATCTATCATGGCTC | 80 | K | 792 |
| 1380346 | 15884 | 15903 | 638 | 657 | TAATACTCCATGACCAGGTA | 41 | K | 793 |
| 1380362 | 17602 | 17621 | N/A | N/A | AAAAGGGCACCCAGAGCCGA | 103 | K | 794 |
| 1380369 | 12874 | 12893 | N/A | N/A | CGCCTGTCTGCAAAGCTGGT | 65 | K | 795 |
| 1380380 | 24038 | 24057 | 2096 | 2115 | GTCGAAGACAGTTCTAGGGT | 17 | K | 796 |
| 1380424 | 22191 | 22210 | N/A | N/A | AGGATTCCCACCTGCCCAAG | 58 | K | 797 |
| 1380442 | 21066 | 21085 | N/A | N/A | TGACTAGAAAACCAACTGTT | 81 | K | 798 |
| 1380483 | 22321 | 22340 | N/A | N/A | CTCTGCTGCTCAAAATCCCT | 87 | K | 799 |
| 1380493 | 24452 | 24471 | 2510 | 2529 | AAGCTTTGCACTTTGCGAAC | 47 | K | 800 |
| 1380494 | 22233 | 22252 | N/A | N/A | TCTCAGGAATGATTCAGCCA | 54 | K | 801 |
| 1380532 | 21462 | 21481 | N/A | N/A | CTTGACATGTGACCGCTGCA | 63 | K | 802 |
| 1380603 | 15171 | 15190 | 547 | 566 | CCCTCTCCTCACGGAAGCAC | 51 | K | 803 |
| 1380613 | 9683 | 9702 | N/A | N/A | ACTCTACGATTCCAAAACTG | 62 | K | 804 |
| 1380616 | 19373 | 19392 | N/A | N/A | CAGGGCTTATCTAAAGTGGC | 76 | K | 805 |
| 1380629 | 15630 | 15649 | N/A | N/A | ATTCACTCCCCCTGAGATGT | 59 | K | 806 |
| 1380632 | 17163 | 17182 | 1316 | 1335 | ATGGCAGTGAGCCCGTCCTC | 91 | K | 807 |
| 1380678 | 20883 | 20902 | N/A | N/A | TACTTGTGATAAGCAATGCA | 32 | K | 808 |
| 1380687 | 22337 | 22356 | N/A | N/A | AACACAACCTATGTCCCTCT | 54 | K | 809 |
| 1380702 | 22915 | 22934 | 1763 | 1782 | AACTCCATCCGCTCCTGCAA | 103 | K | 810 |
| 1380758 | 21121 | 21140 | N/A | N/A | TGGAGTTCATTAATGATAAG | 42 | K | 811 |
| 1380800 | 13971 | 13990 | N/A | N/A | GGTCCTATGACTAGGAATGT | 63 | K | 812 |
| 1380801 | 14528 | 14547 | N/A | N/A | TCACCCTAGGACTGTCTGCT | 41 | K | 813 |
| 1380811 | 24629 | 24648 | 2687 | 2706 | GTCAATAAATATCCAAACCG | 85 | K | 814 |
| 1380818 | 17261 | 17280 | N/A | N/A | AGGTAGGCACTGTCCTTACT | 117 | K | 815 |
| 1380844 | 15335 | 15354 | N/A | N/A | CCCCCAATCCTAGAGCTTCC | 35 | K | 816 |
| 1380864 | 14016 | 14035 | N/A | N/A | CCTACCCCTTATTTACAGAT | 22 | K | 817 |
| 1380912 | 22304 | 22323 | N/A | N/A | CCTCCAGCTCCCTAATGCCC | 87 | K | 818 |
| 1380939 | 17468 | 17487 | N/A | N/A | AAAGCCCTCCAGGACCTTCC | 73 | K | 819 |
| 1380972 | 19710 | 19729 | N/A | N/A | AAGGTCCTCCAACTCTGGCC | 58 | K | 820 |
| 1380995 | 10688 | 10707 | N/A | N/A | AGCACAGACAATAGCAAGGG | 9 | K | 821 |
| 1381020 | 21048 | 21067 | N/A | N/A | TTCTCTTAGACAAAGTAGCA | 47 | K | 822 |
| 1381042 | 20928 | 20947 | N/A | N/A | CTCACGAGATATCAACTTCC | 78 | K | 823 |
| 1381051 | 11711 | 11730 | N/A | N/A | CCCCTTGCTCCCGACAAGCT | 88 | K | 824 |
| 1381070 | 13477 | 13496 | N/A | N/A | TGGGAGAAGGTTTTTCCAGA | 62 | K | 825 |
| 1381087 | 21993 | 22012 | N/A | N/A | CTCCGTGGTTTCTGTCTGCT | 42 | K | 826 |
| 1381102 | 24165 | 24184 | 2223 | 2242 | GGCGGGCCCGGATCACAGGA | 100 | K | 827 |
| 1381126 | 22288 | 22307 | N/A | N/A | GCCCTCACGACAAAAGGCCT | 84 | K | 828 |
| 1381132 | 17739 | 17758 | N/A | N/A | TTTTTCTTGTATCCTGTTGC | 24 | K | 829 |
| 1381140 | 16710 | 16729 | 939 | 958 | CCCAGGCCCACCGCCCACAG | 77 | K | 830 |
| 1381177 | 19507 | 19526 | 1368 | 1387 | TAGCGGCGCACCTTCCCGAA | 89 | K | 831 |
| 1381183 | 19844 | 19863 | N/A | N/A | AGTTCTGAAGTCCTGTGGCT | 27 | K | 832 |
| 1381201 | 19662 | 19681 | N/A | N/A | AAGGTTCCAAGACTGATCCT | 94 | K | 833 |
| 1381233 | 17710 | 17729 | N/A | N/A | GGGCACCTGCCACACTCTCC | 79 | K | 834 |
| 1381240 | 15975 | 15994 | 729 | 748 | CATGACAATCTCCGCCAGGT | 67 | K | 835 |
| 1381249 | 12177 | 12196 | 210 | 229 | CCTCAGCCGCACCTCGGCTG | 77 | K | 836 |
| 1381258 | 24237 | 24256 | 2295 | 2314 | CCCGGCTACAAGGACCCTTC | 62 | K | 837 |
| 1381268 | 17076 | 17095 | 1229 | 1248 | CGGAGACCATCCCAGTCGAG | 74 | K | 838 |
| 1381273 | 14031 | 14050 | N/A | N/A | GAGGAGTGCTTTAGTCCTAC | 67 | K | 839 |
| 1381275 | 22127 | 22146 | N/A | N/A | TTCCATGGCTTGTTTCTCCT | 56 | K | 840 |
| 1381279 | 15011 | 15030 | 466 | 485 | CCGTCTGCTTCATCTTCACT | 59 | K | 841 |
| 1381294 | 15071 | 15090 | N/A | N/A | TCACCTCGCCCCTCTTCAGC | 63 | K | 842 |
| 1381345 | 21878 | 21897 | N/A | N/A | TCCACCAACTTACTGTTTCA | 124 | K | 843 |
| 1381349 | 24553 | 24572 | 2611 | 2630 | GCGGGATCCCCGAAAAAGCG | 72 | K | 844 |
| 1381374 | 24500 | 24519 | 2558 | 2577 | GCAGAGATCGCGCCAGACGC | 63 | K | 845 |
| 1381380 | 24778 | 24797 | 2836 | 2855 | GGAGGGCCTTTTATTCGCGA | 94 | K | 846 |
| 1381387 | 22621 | 22640 | 1574 | 1593 | TCAGCCTCTGCCGCAGGGAC | 211 | K | 847 |
| 1381390 | 17694 | 17713 | N/A | N/A | CTCCATAATTCTCTAATTCT | 46 | K | 848 |
| 1381439 | 24528 | 24547 | 2586 | 2605 | GGCAAAAGCAAATTTCCCGA | 70 | K | 849 |
| 1381484 | 24438 | 24457 | 2496 | 2515 | GCGAACCAACGATAGGTGGG | 61 | K | 850 |
| 1381490 | 24332 | 24351 | 2390 | 2409 | GCCGAAAGAAAGAAATGGTC | 22 | K | 851 |
| 1381522 | 14199 | 14218 | N/A | N/A | GGGTTGTATCCAGTACCTCT | 83 | K | 852 |
| 1381529 | 15931 | 15950 | 685 | 704 | TCCGCTCCCCAAACTTGCTC | 67 | K | 853 |
| 1381534 | 22872 | 22891 | 1720 | 1739 | CCCGGTTCCGAGCCTCTGCC | 4† | K | 854 |
| 1381540 | 24724 | 24743 | 2782 | 2801 | AATAAATACCGAGGAATGTC | 64 | K | 855 |
| 1381569 | 24076 | 24095 | 2134 | 2153 | CGTGCCCCGGGCACTCAGTC | 82 | K | 856 |
| 1381570 | 14166 | 14185 | N/A | N/A | GGTGGTTCTTGAACCACACT | 113 | K | 857 |
| 1381588 | 17148 | 17167 | 1301 | 1320 | TCCTCCACCAAGTCGAAGTT | 103 | K | 858 |
| 1381589 | 24220 | 24239 | 2278 | 2297 | TTCGAGCCCCGTTCGCCGGC | 84 | K | 859 |
| 1381591 | 14662 | 14681 | 372 | 391 | CTTAAGCCTCACCACGATGG | 74 | K | 860 |
| 1381619 | 24372 | 24391 | 2430 | 2449 | AGGCCTGCAGTTTGCCCATC | 16 | K | 861 |
| 1381633 | 16848 | 16867 | N/A | N/A | CGTGCTCACCTTGTAGTGGA | 43 | K | 862 |
| 1381662 | 24133 | 24152 | 2191 | 2210 | GGAGACCCACGCTCGGAGCG | 76 | K | 863 |
| 1381682 | 12754 | 12773 | N/A | N/A | CCCTGGCAGCTGCCCCATGC | 134 | K | 864 |
| 1381688 | 16334 | 16353 | 816 | 835 | GCGGATGTGGCCACAGCGGT | 83 | K | 865 |
| 1052863 | 24725 | 24744 | 2783 | 2802 | CAATAAATACCGAGGAATGT | 43 | L | 866 |
| 1052873 | 19496 | 19515 | 1357 | 1376 | CTTCCCGAATGTCCGACAGT | 67 | L | 19 |
| 1380296 | 15336 | 15355 | N/A | N/A | ACCCCCAATCCTAGAGCTTC | 119 | L | 867 |
| 1380329 | 22234 | 22253 | N/A | N/A | TTCTCAGGAATGATTCAGCC | 26 | L | 868 |
| 1380330 | 17711 | 17730 | N/A | N/A | AGGGCACCTGCCACACTCTC | 3 | L | 869 |
| 1380355 | 21123 | 21142 | N/A | N/A | GCTGGAGTTCATTAATGATA | 26 | L | 870 |
| 1380360 | 24390 | 24409 | 2448 | 2467 | CCGGCTTGCTGCCTTCCCAG | 62 | L | 871 |
| 1380418 | 15932 | 15951 | 686 | 705 | ATCCGCTCCCCAAACTTGCT | 46 | L | 872 |
| 1380419 | 22193 | 22212 | N/A | N/A | TCAGGATTCCCACCTGCCCA | 50 | L | 873 |
| 1380453 | 20884 | 20903 | N/A | N/A | TTACTTGTGATAAGCAATGC | 22 | L | 874 |
| 1380492 | 17351 | 17370 | N/A | N/A | TGGACTGTAAGTCTAGGTCA | 79 | L | 875 |
| 1380509 | 21088 | 21107 | N/A | N/A | AATGTTGTCCAGTAATAAAA | 51 | L | 876 |
| 1380515 | 17164 | 17183 | 1317 | 1336 | CATGGCAGTGAGCCCGTCCT | 61 | L | 877 |
| 1380517 | 24453 | 24472 | 2511 | 2530 | AAAGCTTTGCACTTTGCGAA | 24 | L | 878 |
| 1380562 | 22322 | 22341 | N/A | N/A | CCTCTGCTGCTCAAAATCCC | 95 | L | 879 |
| 1380574 | 13973 | 13992 | N/A | N/A | AAGGTCCTATGACTAGGAAT | 23 | L | 880 |
| 1380624 | 17603 | 17622 | N/A | N/A | CAAAAGGGCACCCAGAGCCG | 52 | L | 881 |
| 1380679 | 19923 | 19942 | N/A | N/A | CCTTATTGTTATATGGCTGA | 3 | L | 882 |
| 1380681 | 22338 | 22357 | N/A | N/A | TAACACAACCTATGTCCCTC | 99 | L | 883 |
| 1380699 | 12875 | 12894 | N/A | N/A | GCGCCTGTCTGCAAAGCTGG | 54 | L | 884 |
| 1380701 | 21049 | 21068 | N/A | N/A | GTTCTCTTAGACAAAGTAGC | 16 | L | 885 |
| 1380732 | 19491 | 19510 | 1352 | 1371 | CGAATGTCCGACAGTGTCTC | 77 | L | 886 |
| 1380743 | 17469 | 17488 | N/A | N/A | GAAAGCCCTCCAGGACCTTC | 74 | L | 887 |
| 1380778 | 14232 | 14251 | N/A | N/A | ATGTAGAATGTCCTGGGTAA | 25 | L | 888 |
| 1380859 | 22917 | 22936 | 1765 | 1784 | GCAACTCCATCCGCTCCTGC | 84 | L | 889 |
| 1380860 | 17262 | 17281 | N/A | N/A | AAGGTAGGCACTGTCCTTAC | 121 | L | 890 |
| 1380914 | 22289 | 22308 | N/A | N/A | TGCCCTCACGACAAAAGGCC | 81 | L | 891 |
| 1380918 | 19711 | 19730 | N/A | N/A | TAAGGTCCTCCAACTCTGGC | 32 | L | 892 |
| 1380928 | 24630 | 24649 | 2688 | 2707 | GGTCAATAAATATCCAAACC | 48 | L | 893 |
| 1380931 | 9684 | 9703 | N/A | N/A | GACTCTACGATTCCAAAACT | 68 | L | 894 |
| 1380933 | 21463 | 21482 | N/A | N/A | CCTTGACATGTGACCGCTGC | 42 | L | 895 |
| 1380942 | 14529 | 14548 | N/A | N/A | TTCACCCTAGGACTGTCTGC | 39 | L | 896 |
| 1381021 | 17742 | 17761 | N/A | N/A | CATTTTTTCTTGTATCCTGT | 18 | L | 897 |
| 1381062 | 15885 | 15904 | 639 | 658 | GTAATACTCCATGACCAGGT | 33 | L | 898 |
| 1381065 | 15632 | 15651 | N/A | N/A | AGATTCACTCCCCCTGAGAT | 68 | L | 899 |
| 1381069 | 10709 | 10728 | N/A | N/A | CATAATTTAACACTCTTCAA | 33 | L | 900 |
| 1381079 | 14017 | 14036 | N/A | N/A | TCCTACCCCTTATTTACAGA | 26 | L | 901 |
| 1381106 | 22305 | 22324 | N/A | N/A | CCCTCCAGCTCCCTAATGCC | 109 | L | 902 |
| 1381144 | 24042 | 24061 | 2100 | 2119 | CGGAGTCGAAGACAGTTCTA | 64 | L | 903 |
| 1381176 | 19848 | 19867 | N/A | N/A | TCCAAGTTCTGAAGTCCTGT | 7 | L | 904 |
| 1381188 | 19663 | 19682 | N/A | N/A | TAAGGTTCCAAGACTGATCC | 60 | L | 905 |
| 1381193 | 20811 | 20830 | N/A | N/A | GGCTGGAATCTATCATGGCT | 134 | L | 906 |
| 1381206 | 15172 | 15191 | 548 | 567 | TCCCTCTCCTCACGGAAGCA | 56 | L | 907 |
| 1381226 | 16711 | 16730 | 940 | 959 | TCCCAGGCCCACCGCCCACA | 69 | L | 908 |
| 1381237 | 13605 | 13624 | N/A | N/A | GCCACAAAAGGAGTGCTCCT | 82 | L | 909 |
| 1381246 | 15012 | 15031 | 467 | 486 | CCCGTCTGCTTCATCTTCAC | 92 | L | 910 |
| 1381253 | 24779 | 24798 | 2837 | 2856 | TGGAGGGCCTTTTATTCGCG | 30 | L | 911 |
| 1381269 | 12178 | 12197 | 211 | 230 | GCCTCAGCCGCACCTCGGCT | 79 | L | 912 |
| 1381302 | 16850 | 16869 | N/A | N/A | GCCGTGCTCACCTTGTAGTG | 66 | L | 913 |
| 1381318 | 15072 | 15091 | N/A | N/A | CTCACCTCGCCCCTCTTCAG | 42 | L | 914 |
| 1381352 | 20929 | 20948 | N/A | N/A | GCTCACGAGATATCAACTTC | 45 | L | 915 |
| 1381353 | 17077 | 17096 | 1230 | 1249 | CCGGAGACCATCCCAGTCGA | 53 | L | 916 |
| 1381381 | 17696 | 17715 | N/A | N/A | CTCTCCATAATTCTCTAATT | 56 | L | 917 |
| 1381385 | 24188 | 24207 | 2246 | 2265 | CCCTCCCTCCCCGGCCGCTA | 142 | L | 918 |
| 1381405 | 14663 | 14682 | 373 | 392 | CCTTAAGCCTCACCACGATG | 83 | L | 919 |
| 1381409 | 24554 | 24573 | 2612 | 2631 | CGCGGGATCCCCGAAAAAGC | 67 | L | 920 |
| 1381419 | 17149 | 17168 | 1302 | 1321 | GTCCTCCACCAAGTCGAAGT | 63 | L | 921 |
| 1381422 | 22622 | 22641 | 1575 | 1594 | CTCAGCCTCTGCCGCAGGGA | 144 | L | 922 |
| 1381423 | 22040 | 22059 | N/A | N/A | CCCACTGTAACTACAGAGAC | 94 | L | 923 |
| 1381440 | 21880 | 21899 | N/A | N/A | CCTCCACCAACTTACTGTTT | 104 | L | 924 |
| 1381449 | 14167 | 14186 | N/A | N/A | AGGTGGTTCTTGAACCACAC | 64 | L | 925 |
| 1381463 | 24503 | 24522 | 2561 | 2580 | CAGGCAGAGATCGCGCCAGA | 67 | L | 926 |
| 1381473 | 22137 | 22156 | N/A | N/A | GCACCTTTCCTTCCATGGCT | 39 | L | 927 |
| 1381489 | 24221 | 24240 | 2279 | 2298 | CTTCGAGCCCCGTTCGCCGG | 101 | L | 928 |
| 1381503 | 24529 | 24548 | 2587 | 2606 | TGGCAAAAGCAAATTTCCCG | 50 | L | 929 |
| 1381505 | 14045 | 14064 | N/A | N/A | TCTCAGTCCTCCAGGAGGAG | 60 | L | 930 |
| 1381508 | 16378 | 16397 | 860 | 879 | GTTCCATCTGCCCGCAGCTT | 41 | L | 931 |
| 1381550 | 12145 | 12164 | 178 | 197 | GGCAGCACCATGGCCCCTCC | 102 | L | 932 |
| 1381559 | 24077 | 24096 | 2135 | 2154 | CCGTGCCCCGGGCACTCAGT | 121 | L | 933 |
| 1381563 | 22878 | 22897 | 1726 | 1745 | CTAGGTCCCGGTTCCGAGCC | 5† | L | 934 |
| 1381573 | 19530 | 19549 | 1391 | 1410 | CCCACAAAAGGCAGGTGGAC | 129 | L | 935 |
| 1381586 | 24333 | 24352 | 2391 | 2410 | GGCCGAAAGAAAGAAATGGT | 72 | L | 936 |
| 1381599 | 24373 | 24392 | 2431 | 2450 | CAGGCCTGCAGTTTGCCCAT | 36 | L | 937 |
| 1381611 | 24439 | 24458 | 2497 | 2516 | TGCGAACCAACGATAGGTGG | 54 | L | 938 |
| 1381623 | 12760 | 12779 | N/A | N/A | CTGCGCCCCTGGCAGCTGCC | 100 | L | 939 |
| 1381648 | 15976 | 15995 | 730 | 749 | CCATGACAATCTCCGCCAGG | 44 | L | 940 |
| 1381663 | 24238 | 24257 | 2296 | 2315 | TCCCGGCTACAAGGACCCTT | 70 | L | 941 |
| 1381671 | 24134 | 24153 | 2192 | 2211 | CGGAGACCCACGCTCGGAGC | 24 | L | 942 |
| 1052864 | 24726 | 24745 | 2784 | 2803 | ACAATAAATACCGAGGAATG | 56 | M | 943 |
| 1052873 | 19496 | 19515 | 1357 | 1376 | CTTCCCGAATGTCCGACAGT | 93 | M | 19 |
| 1380359 | 24043 | 24062 | 2101 | 2120 | CCGGAGTCGAAGACAGTTCT | 82 | M | 944 |
| 1380372 | 21089 | 21108 | N/A | N/A | TAATGTTGTCCAGTAATAAA | 57 | M | 945 |
| 1380379 | 24454 | 24473 | 2512 | 2531 | GAAAGCTTTGCACTTTGCGA | 62 | M | 946 |
| 1380411 | 15173 | 15192 | 549 | 568 | GTCCCTCTCCTCACGGAAGC | 48 | M | 947 |
| 1380434 | 19357 | 19376 | N/A | N/A | TGGCCCCTCCAGCATTTTTT | 88 | M | 948 |
| 1380444 | 20812 | 20831 | N/A | N/A | AGGCTGGAATCTATCATGGC | 72 | M | 949 |
| 1380450 | 22048 | 22067 | N/A | N/A | CTTAATGCCCCACTGTAACT | 93 | M | 950 |
| 1380481 | 22339 | 22358 | N/A | N/A | CTAACACAACCTATGTCCCT | 93 | M | 951 |
| 1380553 | 19492 | 19511 | 1353 | 1372 | CCGAATGTCCGACAGTGTCT | 62 | M | 952 |
| 1380577 | 16697 | 16716 | 926 | 945 | CCCACAGCCTGCAGGATCTC | 68 | M | 953 |
| 1380583 | 17166 | 17185 | 1319 | 1338 | ACCATGGCAGTGAGCCCGTC | 72 | M | 954 |
| 1380597 | 20886 | 20905 | N/A | N/A | ATTTACTTGTGATAAGCAAT | 30 | M | 955 |
| 1380630 | 19850 | 19869 | N/A | N/A | TTTCCAAGTTCTGAAGTCCT | 28 | M | 956 |
| 1380650 | 17713 | 17732 | N/A | N/A | TCAGGGCACCTGCCACACTC | 99 | M | 957 |
| 1380719 | 24631 | 24650 | 2689 | 2708 | AGGTCAATAAATATCCAAAC | 56 | M | 958 |
| 1380720 | 21975 | 21994 | N/A | N/A | CTTCTGTTCAGGAAGTCCCT | 75 | M | 959 |
| 1380721 | 10710 | 10729 | N/A | N/A | CCATAATTTAACACTCTTCA | 17 | M | 960 |
| 1380739 | 17276 | 17295 | N/A | N/A | ATTCAGGACCCCAGAAGGTA | 66 | M | 961 |
| 1380817 | 21465 | 21484 | N/A | N/A | TCCCTTGACATGTGACCGCT | 81 | M | 962 |
| 1380821 | 14531 | 14550 | N/A | N/A | GCTTCACCCTAGGACTGTCT | 26 | M | 963 |
| 1380885 | 15633 | 15652 | N/A | N/A | CAGATTCACTCCCCCTGAGA | 90 | M | 964 |
| 1380889 | 17604 | 17623 | N/A | N/A | GCAAAAGGGCACCCAGAGCC | 67 | M | 965 |
| 1380904 | 17697 | 17716 | N/A | N/A | ACTCTCCATAATTCTCTAAT | 109 | M | 966 |
| 1380905 | 13974 | 13993 | N/A | N/A | CAAGGTCCTATGACTAGGAA | 35 | M | 967 |
| 1380930 | 17470 | 17489 | N/A | N/A | AGAAAGCCCTCCAGGACCTT | 82 | M | 968 |
| 1380953 | 9685 | 9704 | N/A | N/A | GGACTCTACGATTCCAAAAC | 57 | M | 969 |
| 1380955 | 22237 | 22256 | N/A | N/A | GCCTTCTCAGGAATGATTCA | 78 | M | 970 |
| 1380978 | 14018 | 14037 | N/A | N/A | GTCCTACCCCTTATTTACAG | 39 | M | 971 |
| 1380993 | 19924 | 19943 | N/A | N/A | GCCTTATTGTTATATGGCTG | 102 | M | 972 |
| 1381016 | 15337 | 15356 | N/A | N/A | CACCCCCAATCCTAGAGCTT | 77 | M | 973 |
| 1381043 | 22194 | 22213 | N/A | N/A | ATCAGGATTCCCACCTGCCC | 137 | M | 974 |
| 1381083 | 19664 | 19683 | N/A | N/A | GTAAGGTTCCAAGACTGATC | 28 | M | 975 |
| 1381084 | 20930 | 20949 | N/A | N/A | AGCTCACGAGATATCAACTT | 124 | M | 976 |
| 1381094 | 16712 | 16731 | 941 | 960 | GTCCCAGGCCCACCGCCCAC | 75 | M | 977 |
| 1381124 | 22323 | 22342 | N/A | N/A | CCCTCTGCTGCTCAAAATCC | 55 | M | 978 |
| 1381142 | 22291 | 22310 | N/A | N/A | AATGCCCTCACGACAAAAGG | 60 | M | 979 |
| 1381161 | 22306 | 22325 | N/A | N/A | TCCCTCCAGCTCCCTAATGC | 101 | M | 980 |
| 1381212 | 14233 | 14252 | N/A | N/A | CATGTAGAATGTCCTGGGTA | 44 | M | 981 |
| 1381216 | 19712 | 19731 | N/A | N/A | TTAAGGTCCTCCAACTCTGG | 91 | M | 982 |
| 1381221 | 21050 | 21069 | N/A | N/A | TGTTCTCTTAGACAAAGTAG | 50 | M | 983 |
| 1381247 | 13606 | 13625 | N/A | N/A | GGCCACAAAAGGAGTGCTCC | 109 | M | 984 |
| 1381261 | 21170 | 21189 | N/A | N/A | GTTCAATCCTGACCCACCGT | 63 | M | 985 |
| 1381272 | 12766 | 12785 | N/A | N/A | TGTCGGCTGCGCCCCTGGCA | 136 | M | 986 |
| 1381281 | 24391 | 24410 | 2449 | 2468 | CCCGGCTTGCTGCCTTCCCA | 82 | M | 987 |
| 1381282 | 15977 | 15996 | 731 | 750 | GCCATGACAATCTCCGCCAG | 62 | M | 988 |
| 1381283 | 12521 | 12540 | N/A | N/A | TGACCTTACTCTGCCCCTCC | 40 | M | 989 |
| 1381299 | 15910 | 15929 | 664 | 683 | GCAGTGTCAGCAGGTCCCCG | 78 | M | 990 |
| 1381312 | 14047 | 14066 | N/A | N/A | TCTCTCAGTCCTCCAGGAGG | 125 | M | 991 |
| 1381327 | 22883 | 22902 | 1731 | 1750 | TGCCTCTAGGTCCCGGTTCC | 10† | M | 992 |
| 1381329 | 19531 | 19550 | 1392 | 1411 | GCCCACAAAAGGCAGGTGGA | 103 | M | 993 |
| 1381358 | 12147 | 12166 | 180 | 199 | CAGGCAGCACCATGGCCCCT | 115 | M | 994 |
| 1381364 | 15073 | 15092 | N/A | N/A | CCTCACCTCGCCCCTCTTCA | 64 | M | 995 |
| 1381371 | 17015 | 17034 | 1168 | 1187 | CCCGGCCCAGCCGTGTCTCC | 123 | M | 996 |
| 1381384 | 24374 | 24393 | 2432 | 2451 | CCAGGCCTGCAGTTTGCCCA | 104 | M | 997 |
| 1381391 | 17150 | 17169 | 1303 | 1322 | CGTCCTCCACCAAGTCGAAG | 68 | M | 998 |
| 1381392 | 24555 | 24574 | 2613 | 2632 | GCGCGGGATCCCCGAAAAAG | 108 | M | 999 |
| 1381406 | 24195 | 24214 | 2253 | 2272 | ACCCGGCCCCTCCCTCCCCG | 65 | M | 1000 |
| 1381416 | 22138 | 22157 | N/A | N/A | GGCACCTTTCCTTCCATGGC | 46 | M | 1001 |
| 1381452 | 24530 | 24549 | 2588 | 2607 | TTGGCAAAAGCAAATTTCCC | 87 | M | 1002 |
| 1381460 | 15013 | 15032 | 468 | 487 | GCCCGTCTGCTTCATCTTCA | 74 | M | 1003 |
| 1381468 | 14664 | 14683 | 374 | 393 | TCCTTAAGCCTCACCACGAT | 115 | M | 1004 |
| 1381474 | 17352 | 17371 | N/A | N/A | CTGGACTGTAAGTCTAGGTC | 67 | M | 1005 |
| 1381485 | 24336 | 24355 | 2394 | 2413 | CCTGGCCGAAAGAAAGAAAT | 104 | M | 1006 |
| 1381511 | 24440 | 24459 | 2498 | 2517 | TTGCGAACCAACGATAGGTG | 58 | M | 1007 |
| 1381520 | 17078 | 17097 | 1231 | 1250 | CCCGGAGACCATCCCAGTCG | 128 | M | 1008 |
| 1381532 | 22626 | 22645 | 1579 | 1598 | CGGCCTCAGCCTCTGCCGCA | 136 | M | 1009 |
| 1381539 | 12919 | 12938 | N/A | N/A | CCCAAAGTTGTCCCTCCTGG | 49 | M | 1010 |
| 1381557 | 24222 | 24241 | 2280 | 2299 | CCTTCGAGCCCCGTTCGCCG | 83 | M | 1011 |
| 1381582 | 24506 | 24525 | 2564 | 2583 | AAGCAGGCAGAGATCGCGCC | 98 | M | 1012 |
| 1381584 | 24135 | 24154 | 2193 | 2212 | GCGGAGACCCACGCTCGGAG | 66 | M | 1013 |
| 1381603 | 24780 | 24799 | 2838 | 2857 | ATGGAGGGCCTTTTATTCGC | 20 | M | 1014 |
| 1381631 | 22918 | 22937 | 1766 | 1785 | AGCAACTCCATCCGCTCCTG | 160 | M | 1015 |
| 1381641 | 24080 | 24099 | 2138 | 2157 | GTGCCGTGCCCCGGGCACTC | 99 | M | 1016 |
| 1381649 | 14169 | 14188 | N/A | N/A | GCAGGTGGTTCTTGAACCAC | 95 | M | 1017 |
| 1381660 | 15936 | 15955 | 690 | 709 | CGGAATCCGCTCCCCAAACT | 59 | M | 1018 |
| 1381683 | 24239 | 24258 | 2297 | 2316 | TTCCCGGCTACAAGGACCCT | 92 | M | 1019 |
| 1052865 | 24727 | 24746 | 2785 | 2804 | GACAATAAATACCGAGGAAT | 31 | N | 1020 |
| 1052870 | 19493 | 19512 | 1354 | 1373 | CCCGAATGTCCGACAGTGTC | 39 | N | 1021 |
| 1052873 | 19496 | 19515 | 1357 | 1376 | CTTCCCGAATGTCCGACAGT | 86 | N | 19 |
| 1052879 | 21092 | 21111 | N/A | N/A | GTGTAATGTTGTCCAGTAAT | 4 | N | 1022 |
| 1380293 | 20887 | 20906 | N/A | N/A | AATTTACTTGTGATAAGCAA | 42 | N | 1023 |
| 1380326 | 17353 | 17372 | N/A | N/A | ACTGGACTGTAAGTCTAGGT | 145 | N | 1024 |
| 1380358 | 17280 | 17299 | N/A | N/A | AGTGATTCAGGACCCCAGAA | 21 | N | 1025 |
| 1380377 | 21052 | 21071 | N/A | N/A | ACTGTTCTCTTAGACAAAGT | 64 | N | 1026 |
| 1380431 | 10711 | 10730 | N/A | N/A | TCCATAATTTAACACTCTTC | 17 | N | 1027 |
| 1380433 | 19359 | 19378 | N/A | N/A | AGTGGCCCCTCCAGCATTTT | 59 | N | 1028 |
| 1380437 | 21976 | 21995 | N/A | N/A | GCTTCTGTTCAGGAAGTCCC | 64 | N | 1029 |
| 1380456 | 19925 | 19944 | N/A | N/A | GGCCTTATTGTTATATGGCT | 83 | N | 1030 |
| 1380458 | 14048 | 14067 | N/A | N/A | ATCTCTCAGTCCTCCAGGAG | 67 | N | 1031 |
| 1380461 | 14532 | 14551 | N/A | N/A | AGCTTCACCCTAGGACTGTC | 47 | N | 1032 |
| 1380496 | 14234 | 14253 | N/A | N/A | TCATGTAGAATGTCCTGGGT | 26 | N | 1033 |
| 1380511 | 24044 | 24063 | 2102 | 2121 | CCCGGAGTCGAAGACAGTTC | 133 | N | 1034 |
| 1380514 | 22340 | 22359 | N/A | N/A | ACTAACACAACCTATGTCCC | 77 | N | 1035 |
| 1380559 | 17605 | 17624 | N/A | N/A | AGCAAAAGGGCACCCAGAGC | 62 | N | 1036 |
| 1380587 | 24456 | 24475 | 2514 | 2533 | AAGAAAGCTTTGCACTTTGC | 46 | N | 1037 |
| 1380598 | 14019 | 14038 | N/A | N/A | AGTCCTACCCCTTATTTACA | 17 | N | 1038 |
| 1380637 | 19665 | 19684 | N/A | N/A | AGTAAGGTTCCAAGACTGAT | 38 | N | 1039 |
| 1380653 | 17117 | 17136 | 1270 | 1289 | TGGCACCTTCGAAATCCGGT | 77 | N | 1040 |
| 1380685 | 20813 | 20832 | N/A | N/A | TAGGCTGGAATCTATCATGG | 58 | N | 1041 |
| 1380692 | 24632 | 24651 | 2690 | 2709 | GAGGTCAATAAATATCCAAA | 54 | N | 1042 |
| 1380695 | 22309 | 22328 | N/A | N/A | AAATCCCTCCAGCTCCCTAA | 70 | N | 1043 |
| 1380734 | 21466 | 21485 | N/A | N/A | CTCCCTTGACATGTGACCGC | 90 | N | 1044 |
| 1380806 | 22050 | 22069 | N/A | N/A | TACTTAATGCCCCACTGTAA | 126 | N | 1045 |
| 1380831 | 16698 | 16717 | 927 | 946 | GCCCACAGCCTGCAGGATCT | 64 | N | 1046 |
| 1380849 | 15174 | 15193 | 550 | 569 | CGTCCCTCTCCTCACGGAAG | 48 | N | 1047 |
| 1380915 | 9686 | 9705 | N/A | N/A | AGGACTCTACGATTCCAAAA | 55 | N | 1048 |
| 1380991 | 19852 | 19871 | N/A | N/A | ATTTTCCAAGTTCTGAAGTC | 70 | N | 1049 |
| 1381003 | 15634 | 15653 | N/A | N/A | GCAGATTCACTCCCCCTGAG | 61 | N | 1050 |
| 1381014 | 22141 | 22160 | N/A | N/A | CTTGGCACCTTTCCTTCCAT | 54 | N | 1051 |
| 1381026 | 22195 | 22214 | N/A | N/A | AATCAGGATTCCCACCTGCC | 87 | N | 1052 |
| 1381059 | 13975 | 13994 | N/A | N/A | TCAAGGTCCTATGACTAGGA | 20 | N | 1053 |
| 1381093 | 22324 | 22343 | N/A | N/A | TCCCTCTGCTGCTCAAAATC | 112 | N | 1054 |
| 1381120 | 16713 | 16732 | 942 | 961 | TGTCCCAGGCCCACCGCCCA | 112 | N | 1055 |
| 1381147 | 22238 | 22257 | N/A | N/A | AGCCTTCTCAGGAATGATTC | 63 | N | 1056 |
| 1381169 | 22293 | 22312 | N/A | N/A | CTAATGCCCTCACGACAAAA | 81 | N | 1057 |
| 1381202 | 19714 | 19733 | N/A | N/A | ATTTAAGGTCCTCCAACTCT | 73 | N | 1058 |
| 1381205 | 15339 | 15358 | N/A | N/A | AGCACCCCCAATCCTAGAGC | 59 | N | 1059 |
| 1381241 | 24375 | 24394 | 2433 | 2452 | CCCAGGCCTGCAGTTTGCCC | 105 | N | 1060 |
| 1381248 | 24392 | 24411 | 2450 | 2469 | GCCCGGCTTGCTGCCTTCCC | 83 | N | 1061 |
| 1381262 | 22884 | 22903 | 1732 | 1751 | GTGCCTCTAGGTCCCGGTTC | 13† | N | 1062 |
| 1381264 | 24782 | 24801 | 2840 | 2859 | AGATGGAGGGCCTTTTATTC | 47 | N | 1063 |
| 1381270 | 17016 | 17035 | 1169 | 1188 | CCCCGGCCCAGCCGTGTCTC | 84 | N | 1064 |
| 1381278 | 24337 | 24356 | 2395 | 2414 | GCCTGGCCGAAAGAAAGAAA | 124 | N | 1065 |
| 1381289 | 17173 | 17192 | 1326 | 1345 | CCCGCTCACCATGGCAGTGA | 130 | N | 1066 |
| 1381300 | 13685 | 13704 | N/A | N/A | GCCCTTTTAAGGCAGCAGGA | 77 | N | 1067 |
| 1381309 | 17491 | 17510 | N/A | N/A | GCTCAGATAGCTCCCCACTC | 102 | N | 1068 |
| 1381335 | 15978 | 15997 | 732 | 751 | GGCCATGACAATCTCCGCCA | 97 | N | 1069 |
| 1381339 | 12767 | 12786 | N/A | N/A | CTGTCGGCTGCGCCCCTGGC | 86 | N | 1070 |
| 1381344 | 19534 | 19553 | 1395 | 1414 | GTAGCCCACAAAAGGCAGGT | 93 | N | 1071 |
| 1381367 | 24441 | 24460 | 2499 | 2518 | TTTGCGAACCAACGATAGGT | 58 | N | 1072 |
| 1381386 | 15016 | 15035 | 471 | 490 | CTGGCCCGTCTGCTTCATCT | 122 | N | 1073 |
| 1381394 | 15914 | 15933 | 668 | 687 | CTCAGCAGTGTCAGCAGGTC | 53 | N | 1074 |
| 1381400 | 15937 | 15956 | 691 | 710 | CCGGAATCCGCTCCCCAAAC | 64 | N | 1075 |
| 1381430 | 24507 | 24526 | 2565 | 2584 | TAAGCAGGCAGAGATCGCGC | 54 | N | 1076 |
| 1381453 | 20946 | 20965 | N/A | N/A | CCACTGCCATCTGGTGAGCT | 60 | N | 1077 |
| 1381477 | 24240 | 24259 | 2298 | 2317 | ATTCCCGGCTACAAGGACCC | 57 | N | 1078 |
| 1381488 | 23026 | 23045 | N/A | N/A | CCTCCTCCAGGTGTCTATAC | 120 | N | 1079 |
| 1381516 | 14184 | 14203 | N/A | N/A | CCTCTAGATTCAGATGCAGG | 70 | N | 1080 |
| 1381519 | 24556 | 24575 | 2614 | 2633 | GGCGCGGGATCCCCGAAAAA | 89 | N | 1081 |
| 1381551 | 12148 | 12167 | 181 | 200 | ACAGGCAGCACCATGGCCCC | 119 | N | 1082 |
| 1381554 | 12522 | 12541 | N/A | N/A | CTGACCTTACTCTGCCCCTC | 19 | N | 1083 |
| 1381564 | 14665 | 14684 | 375 | 394 | CTCCTTAAGCCTCACCACGA | 69 | N | 1084 |
| 1381587 | 24223 | 24242 | 2281 | 2300 | CCCTTCGAGCCCCGTTCGCC | 105 | N | 1085 |
| 1381593 | 21210 | 21229 | N/A | N/A | AGCTATCCTGGACATGCGCC | 53 | N | 1086 |
| 1381594 | 24136 | 24155 | 2194 | 2213 | GGCGGAGACCCACGCTCGGA | 79 | N | 1087 |
| 1381598 | 24082 | 24101 | 2140 | 2159 | CTGTGCCGTGCCCCGGGCAC | 104 | N | 1088 |
| 1381601 | 24531 | 24550 | 2589 | 2608 | TTTGGCAAAAGCAAATTTCC | 82 | N | 1089 |
| 1381606 | 17722 | 17741 | N/A | N/A | TGCTTCCCTTCAGGGCACCT | 63 | N | 1090 |
| 1381622 | 17698 | 17717 | N/A | N/A | CACTCTCCATAATTCTCTAA | 77 | N | 1091 |
| 1381628 | 12999 | 13018 | N/A | N/A | GCTCATAGGAACCGAGACTT | 75 | N | 1092 |
| 1381630 | 15074 | 15093 | N/A | N/A | CCCTCACCTCGCCCCTCTTC | 93 | N | 1093 |
| 1381635 | 17151 | 17170 | 1304 | 1323 | CCGTCCTCCACCAAGTCGAA | 63 | N | 1094 |
| 1381652 | 24199 | 24218 | 2257 | 2276 | GCGGACCCGGCCCCTCCCTC | 85 | N | 1095 |
| 1381659 | 22627 | 22646 | 1580 | 1599 | TCGGCCTCAGCCTCTGCCGC | 111 | N | 1096 |
| 1052873 | 19496 | 19515 | 1357 | 1376 | CTTCCCGAATGTCCGACAGT | 83 | O | 19 |
| 1380292 | 9056 | 9075 | N/A | N/A | TGAGACACTAAGATTTCCCT | 68 | O | 327 |
| 1380373 | 10684 | 10703 | N/A | N/A | CAGACAATAGCAAGGGCAGC | 38 | O | 640 |
| 1380565 | 10405 | 10424 | N/A | N/A | CAAATTTTGTGCAGGTGGGG | 59 | O | 1097 |
| 1380665 | 10407 | 10426 | N/A | N/A | CCCAAATTTTGTGCAGGTGG | 21 | O | 1098 |
| 1382635 | 819 | 838 | N/A | N/A | ATCCTACAATGGTTCGGGCA | 96 | O | 1099 |
| 1382636 | 1127 | 1146 | N/A | N/A | TCATATTTTCCACCAACCTC | 122 | O | 1100 |
| 1382637 | 5046 | 5065 | N/A | N/A | CTCCATGTATGATTCTACAA | 58 | O | 1101 |
| 1382639 | 7676 | 7695 | N/A | N/A | CAGCCACTTCAGATATGTCA | 51 | O | 1102 |
| 1382641 | 5911 | 5930 | N/A | N/A | GTGCAATCCTGCATTTGTCC | 76 | O | 1103 |
| 1382642 | 6319 | 6338 | N/A | N/A | GGGCCTGTCTGTCCTCTGCA | 117 | O | 1104 |
| 1382643 | 3672 | 3691 | N/A | N/A | CTGCATCCTAATGGCATATA | 72 | O | 1105 |
| 1382644 | 1784 | 1803 | N/A | N/A | GGGCCCGAGCCGCCCTCCGC | 139 | O | 1106 |
| 1382645 | 910 | 929 | N/A | N/A | CCATCATAGATCTTTCTAGT | 80 | O | 1107 |
| 1382647 | 3437 | 3456 | N/A | N/A | GCTTGTTGAGGTCAATGGAC | 74 | O | 1108 |
| 1382649 | 2190 | 2209 | N/A | N/A | CCGTTGGCTCCCACGACGAC | 83 | O | 1109 |
| 1382651 | 6786 | 6805 | N/A | N/A | CCTCTTTTCCTCATCCAATC | 86 | O | 1110 |
| 1382653 | 1808 | 1827 | N/A | N/A | GCGCAGTCCCCCATGGCGGC | 94 | O | 1111 |
| 1382655 | 10234 | 10253 | N/A | N/A | CTGGTTGGGAGGAGATGCCC | 88 | O | 1112 |
| 1382657 | 7653 | 7672 | N/A | N/A | TGGTCTTGTCGATCAACCGC | 84 | O | 1113 |
| 1382658 | 4825 | 4844 | N/A | N/A | CTGCAAAATGGGCAGCACAC | 103 | O | 1114 |
| 1382659 | 6084 | 6103 | N/A | N/A | CAGGGCTCAGGTGAGCCCCA | 138 | O | 1115 |
| 1382662 | 6234 | 6253 | N/A | N/A | GCAGCCTCTCTCAAGCAGGG | 45 | O | 1116 |
| 1382665 | 7673 | 7692 | N/A | N/A | CCACTTCAGATATGTCACCT | 31 | O | 1117 |
| 1382671 | 3601 | 3620 | N/A | N/A | CTCCTCATTGAACAGCTTGC | 98 | O | 1118 |
| 1382672 | 7354 | 7373 | N/A | N/A | GCCACAGAATTGTCCTGTAT | 47 | O | 1119 |
| 1382673 | 2835 | 2854 | N/A | N/A | GGGTTCTCACCACATCGCTT | 42 | O | 1120 |
| 1382675 | 2546 | 2565 | N/A | N/A | CTTGCATCACCTCATGATTC | 79 | O | 1121 |
| 1382677 | 3455 | 3474 | N/A | N/A | AGATCCGCTTGTCAATTGGC | 51 | O | 1122 |
| 1382679 | 3676 | 3695 | N/A | N/A | GCAGCTGCATCCTAATGGCA | 111 | O | 1123 |
| 1382683 | 5221 | 5240 | N/A | N/A | ATCCACTGACTGTTCCGTTC | 29 | O | 1124 |
| 1382688 | 3577 | 3596 | N/A | N/A | GTCCTTTTTGATGAGATCCA | 67 | O | 1125 |
| 1382689 | 3451 | 3470 | N/A | N/A | CCGCTTGTCAATTGGCTTGT | 108 | O | 1126 |
| 1382694 | 6919 | 6938 | N/A | N/A | GAAGCGATCTTTGTTTGGTT | 40 | O | 1127 |
| 1382700 | 2463 | 2482 | N/A | N/A | CCATCATGTCCAATAGTCAC | 93 | O | 1128 |
| 1382702 | 8213 | 8232 | N/A | N/A | CTCCTCTTCGCCGCTCCGCT | 102 | O | 1129 |
| 1382703 | 7668 | 7687 | N/A | N/A | TCAGATATGTCACCTTGGTC | 24 | O | 1130 |
| 1382705 | 2549 | 2568 | N/A | N/A | GGGCTTGCATCACCTCATGA | 120 | O | 1131 |
| 1382707 | 961 | 980 | N/A | N/A | CAGCTCCTACTCATAGCCAG | 136 | O | 1132 |
| 1382709 | 1780 | 1799 | N/A | N/A | CCGAGCCGCCCTCCGCGCCG | 71 | O | 1133 |
| 1382712 | 892 | 911 | N/A | N/A | GTCTCATGTAGTCAATGGCC | 118 | O | 1134 |
| 1382713 | 3453 | 3472 | N/A | N/A | ATCCGCTTGTCAATTGGCTT | 60 | O | 1135 |
| 1382716 | 3600 | 3619 | N/A | N/A | TCCTCATTGAACAGCTTGCT | 102 | O | 1136 |
| 1382718 | 5933 | 5952 | N/A | N/A | CTGCACTGGCCACACGGCTT | 87 | O | 1137 |
| 1382719 | 5920 | 5939 | N/A | N/A | ACGGCTTCTGTGCAATCCTG | 93 | O | 1138 |
| 1382722 | 9680 | 9699 | N/A | N/A | CTACGATTCCAAAACTGAGG | 40 | O | 1139 |
| 1382723 | 6286 | 6305 | N/A | N/A | TGCTCTGTGAAGTATCAGCC | 85 | O | 1140 |
| 1382724 | 6788 | 6807 | N/A | N/A | CCCCTCTTTTCCTCATCCAA | 85 | O | 1141 |
| 1382727 | 1766 | 1785 | N/A | N/A | GCGCCGCCCGCCGCCATCTT | 78 | O | 1142 |
| 1382728 | 5903 | 5922 | N/A | N/A | CTGCATTTGTCCTAGCTGGC | 90 | O | 1143 |
| 1382733 | 2236 | 2255 | N/A | N/A | CCTCCATCCTTTCAGCACCC | 70 | O | 1144 |
| 1382734 | 6914 | 6933 | N/A | N/A | GATCTTTGTTTGGTTCACTA | 20 | O | 1145 |
| 1382735 | 1071 | 1090 | N/A | N/A | CCTCACTTGTCCTCCAAAAC | 104 | O | 1146 |
| 1382736 | 2456 | 2475 | N/A | N/A | GTCCAATAGTCACCATCCCA | 35 | O | 1147 |
| 1382739 | 8202 | 8221 | N/A | N/A | CGCTCCGCTCCCCATCAGCA | 101 | O | 1148 |
| 1382740 | 2612 | 2631 | N/A | N/A | GCTCAATCTCAAGACCCCTC | 81 | O | 1149 |
| 1382741 | 11304 | 11323 | N/A | N/A | GAAACAGAAACATTTCGGGG | 27 | O | 1150 |
| 1382746 | 7358 | 7377 | N/A | N/A | GCTTGCCACAGAATTGTCCT | 125 | O | 1151 |
| 1382747 | 4809 | 4828 | N/A | N/A | ACACTTCTGTATCCACTGGT | 31 | O | 1152 |
| 1382748 | 5869 | 5888 | N/A | N/A | TGTCCTTCTTGGCTGGGTGT | 64 | O | 1153 |
| 1382752 | 9476 | 9495 | N/A | N/A | CTCTGTTCTAAGAGGTGATG | 77 | O | 1154 |
| 1382755 | 10496 | 10515 | N/A | N/A | GAGGTCATTGTACTTGGCAG | 19 | O | 1155 |
| 1382757 | 10009 | 10028 | N/A | N/A | CACGCAATAATCAAAGTCCT | 77 | O | 1156 |
| 1382758 | 10757 | 10776 | N/A | N/A | AGTATAAATAAGAGGTCCTG | 39 | O | 1157 |
| 1382760 | 5053 | 5072 | N/A | N/A | GAGCAATCTCCATGTATGAT | 20 | O | 1158 |
| 1382761 | 4813 | 4832 | N/A | N/A | CAGCACACTTCTGTATCCAC | 27 | O | 1159 |
| 1382762 | 8060 | 8079 | N/A | N/A | GACCAGGTCATCTTCGCCAC | 95 | O | 1160 |
| 1382764 | 2554 | 2573 | N/A | N/A | CCTCTGGGCTTGCATCACCT | 116 | O | 1161 |
| 1382766 | 6916 | 6935 | N/A | N/A | GCGATCTTTGTTTGGTTCAC | 42 | O | 1162 |
| 1382767 | 7307 | 7326 | N/A | N/A | GAACAGTAGTGGTCCGTGGC | 52 | O | 1163 |
| 1382770 | 8196 | 8215 | N/A | N/A | GCTCCCCATCAGCACCGGCT | 98 | O | 1164 |
| 1382771 | 7689 | 7708 | N/A | N/A | TCTCCGACTCAGGCAGCCAC | 82 | 0 | 1165 |
| 1382772 | 5121 | 5140 | N/A | N/A | GAGCAGTCCCTGCCCGCGGA | 88 | O | 1166 |
| 1382773 | 5208 | 5227 | N/A | N/A | TCCGTTCACTCCCTTCAGCC | 54 | O | 1167 |
| 1382774 | 8054 | 8073 | N/A | N/A | GTCATCTTCGCCACCCGTCA | 40 | O | 1168 |
| 1382775 | 1131 | 1150 | N/A | N/A | TCCTTCATATTTTCCACCAA | 99 | O | 1169 |
| 1382779 | 7392 | 7411 | N/A | N/A | CTCGATGTCCCATCTTTGGC | 103 | O | 1170 |
| 1382780 | 1133 | 1152 | N/A | N/A | CATCCTTCATATTTTCCACC | 145 | O | 1171 |
| 1052873 | 19496 | 19515 | 1357 | 1376 | CTTCCCGAATGTCCGACAGT | 100 | P | 19 |
| 1380516 | 10683 | 10702 | N/A | N/A | AGACAATAGCAAGGGCAGCT | 14 | P | 1172 |
| 1380835 | 9239 | 9258 | N/A | N/A | GAAATAGATTCTGGTTCGAG | 24 | P | 1173 |
| 1380898 | 10406 | 10425 | N/A | N/A | CCAAATTTTGTGCAGGTGGG | 41 | P | 1174 |
| 1380915 | 9686 | 9705 | N/A | N/A | AGGACTCTACGATTCCAAAA | 88 | P | 1048 |
| 1382638 | 3430 | 3449 | N/A | N/A | GAGGTCAATGGACTTGAGGG | 36 | P | 1175 |
| 1382640 | 3449 | 3468 | N/A | N/A | GCTTGTCAATTGGCTTGTTG | 113 | P | 1176 |
| 1382646 | 7206 | 7225 | N/A | N/A | CAGCGCACCATTCAATCCTC | 62 | P | 1177 |
| 1382648 | 3681 | 3700 | N/A | N/A | CGCAGGCAGCTGCATCCTAA | 87 | P | 1178 |
| 1382650 | 8199 | 8218 | N/A | N/A | TCCGCTCCCCATCAGCACCG | 85 | P | 1179 |
| 1382652 | 5906 | 5925 | N/A | N/A | ATCCTGCATTTGTCCTAGCT | 55 | P | 1180 |
| 1382654 | 10233 | 10252 | N/A | N/A | TGGTTGGGAGGAGATGCCCT | 103 | P | 1181 |
| 1382656 | 4814 | 4833 | N/A | N/A | GCAGCACACTTCTGTATCCA | 47 | P | 1182 |
| 1382660 | 7356 | 7375 | N/A | N/A | TTGCCACAGAATTGTCCTGT | 78 | P | 1183 |
| 1382661 | 1130 | 1149 | N/A | N/A | CCTTCATATTTTCCACCAAC | 87 | P | 1184 |
| 1382663 | 2458 | 2477 | N/A | N/A | ATGTCCAATAGTCACCATCC | 38 | P | 1185 |
| 1382664 | 1779 | 1798 | N/A | N/A | CGAGCCGCCCTCCGCGCCGC | 84 | P | 1186 |
| 1382666 | 10495 | 10514 | N/A | N/A | AGGTCATTGTACTTGGCAGT | 17 | P | 1187 |
| 1382667 | 9550 | 9569 | N/A | N/A | CGCCTACTATGACCTTCCCA | 63 | P | 1188 |
| 1382668 | 6917 | 6936 | N/A | N/A | AGCGATCTTTGTTTGGTTCA | 46 | P | 1189 |
| 1382669 | 2484 | 2503 | N/A | N/A | TCCCACCTCATCTCAGATAC | 77 | P | 1190 |
| 1382670 | 7692 | 7711 | N/A | N/A | GGCTCTCCGACTCAGGCAGC | 63 | P | 1191 |
| 1382674 | 2563 | 2582 | N/A | N/A | TCTCCATCACCTCTGGGCTT | 75 | P | 1192 |
| 1382676 | 5192 | 5211 | N/A | N/A | AGCCATTCACTCATTCTGAG | 33 | P | 1193 |
| 1382678 | 6331 | 6350 | N/A | N/A | GCTCCAATGCCTGGGCCTGT | 109 | P | 1194 |
| 1382680 | 10712 | 10731 | N/A | N/A | TTCCATAATTTAACACTCTT | 29 | P | 1195 |
| 1382681 | 6885 | 6904 | N/A | N/A | GCAGTGCACACAGGAGGCAG | 67 | P | 1196 |
| 1382682 | 3452 | 3471 | N/A | N/A | TCCGCTTGTCAATTGGCTTG | 80 | P | 1197 |
| 1382684 | 4811 | 4830 | N/A | N/A | GCACACTTCTGTATCCACTG | 16 | P | 1198 |
| 1382685 | 1110 | 1129 | N/A | N/A | CTCCAATGTATATTTCCATG | 82 | P | 1199 |
| 1382686 | 956 | 975 | N/A | N/A | CCTACTCATAGCCAGTGCTC | 94 | P | 1200 |
| 1382687 | 2308 | 2327 | N/A | N/A | GTCCATCACATTTAGAATGC | 41 | P | 1201 |
| 1382690 | 7398 | 7417 | N/A | N/A | AGGAGCCTCGATGTCCCATC | 82 | P | 1202 |
| 1382691 | 6250 | 6269 | N/A | N/A | CTGCTCTGAACACTTCGCAG | 108 | P | 1203 |
| 1382692 | 1145 | 1164 | N/A | N/A | GCTAACTCCAAACATCCTTC | 111 | P | 1204 |
| 1382693 | 8912 | 8931 | N/A | N/A | CGCCTTGCCCGGCCGGGCCC | 111 | P | 1205 |
| 1382695 | 10365 | 10384 | N/A | N/A | TCATGGTTAGTCTTGTTAAT | 25 | P | 1206 |
| 1382696 | 2547 | 2566 | N/A | N/A | GCTTGCATCACCTCATGATT | 103 | P | 1207 |
| 1382697 | 5917 | 5936 | N/A | N/A | GCTTCTGTGCAATCCTGCAT | 89 | P | 1208 |
| 1382698 | 7661 | 7680 | N/A | N/A | TGTCACCTTGGTCTTGTCGA | 53 | P | 1209 |
| 1382699 | 2981 | 3000 | N/A | N/A | TCCTAGCATTCTCTTCACTT | 74 | P | 1210 |
| 1382701 | 11537 | 11556 | N/A | N/A | CTGCTTTATACCAGCTTTTT | 28 | P | 1211 |
| 1382704 | 5376 | 5395 | N/A | N/A | AACTGTCTGTCTCCCCAGCT | 78 | P | 1212 |
| 1382706 | 1807 | 1826 | N/A | N/A | CGCAGTCCCCCATGGCGGCG | 114 | P | 1213 |
| 1382708 | 893 | 912 | N/A | N/A | AGTCTCATGTAGTCAATGGC | 89 | P | 1214 |
| 1382710 | 6165 | 6184 | N/A | N/A | AAGGAGCTGCTCTCCCAGGA | 92 | P | 1215 |
| 1382711 | 3673 | 3692 | N/A | N/A | GCTGCATCCTAATGGCATAT | 104 | P | 1216 |
| 1382714 | 3463 | 3482 | N/A | N/A | GCCCTTGTAGATCCGCTTGT | 98 | P | 1217 |
| 1382715 | 5047 | 5066 | N/A | N/A | TCTCCATGTATGATTCTACA | 26 | P | 1218 |
| 1382717 | 8061 | 8080 | N/A | N/A | TGACCAGGTCATCTTCGCCA | 76 | P | 1219 |
| 1382720 | 10957 | 10976 | N/A | N/A | TTGTGTGACTCGCAGGTCCG | 54 | P | 1220 |
| 1382721 | 7670 | 7689 | N/A | N/A | CTTCAGATATGTCACCTTGG | 47 | P | 1221 |
| 1382725 | 5875 | 5894 | N/A | N/A | TCAGAATGTCCTTCTTGGCT | 56 | P | 1222 |
| 1382726 | 1869 | 1888 | N/A | N/A | GCCGTCGCCCGGGAGTAGCT | 54 | P | 1223 |
| 1382729 | 6055 | 6074 | N/A | N/A | GCTCCTCCACAGGCTTCCAA | 93 | P | 1224 |
| 1382730 | 7687 | 7706 | N/A | N/A | TCCGACTCAGGCAGCCACTT | 65 | P | 1225 |
| 1382731 | 7652 | 7671 | N/A | N/A | GGTCTTGTCGATCAACCGCT | 93 | P | 1226 |
| 1382732 | 3662 | 3681 | N/A | N/A | ATGGCATATAGTGGGTAGGT | 20 | P | 1227 |
| 1382737 | 7674 | 7693 | N/A | N/A | GCCACTTCAGATATGTCACC | 55 | P | 1228 |
| 1382738 | 3454 | 3473 | N/A | N/A | GATCCGCTTGTCAATTGGCT | 55 | P | 1229 |
| 1382742 | 2550 | 2569 | N/A | N/A | TGGGCTTGCATCACCTCATG | 107 | P | 1230 |
| 1382743 | 4856 | 4875 | N/A | N/A | CCGACTTATTTACTAGCCTC | 81 | P | 1231 |
| 1382744 | 6787 | 6806 | N/A | N/A | CCCTCTTTTCCTCATCCAAT | 72 | P | 1232 |
| 1382745 | 962 | 981 | N/A | N/A | ACAGCTCCTACTCATAGCCA | 138 | P | 1233 |
| 1382749 | 5211 | 5230 | N/A | N/A | TGTTCCGTTCACTCCCTTCA | 43 | P | 1234 |
| 1382750 | 7391 | 7410 | N/A | N/A | TCGATGTCCCATCTTTGGCG | 99 | P | 1235 |
| 1382751 | 5095 | 5114 | N/A | N/A | CGTTTACTGGTATCTCCTCG | 21 | P | 1236 |
| 1382753 | 6915 | 6934 | N/A | N/A | CGATCTTTGTTTGGTTCACT | 20 | P | 1237 |
| 1382754 | 859 | 878 | N/A | N/A | CCTAGAGTGTCCCAAGGGCA | 110 | P | 1238 |
| 1382756 | 2834 | 2853 | N/A | N/A | GGTTCTCACCACATCGCTTT | 58 | P | 1239 |
| 1382759 | 8056 | 8075 | N/A | N/A | AGGTCATCTTCGCCACCCGT | 77 | P | 1240 |
| 1382763 | 5925 | 5944 | N/A | N/A | GCCACACGGCTTCTGTGCAA | 111 | P | 1241 |
| 1382765 | 8205 | 8224 | N/A | N/A | CGCCGCTCCGCTCCCCATCA | 90 | P | 1242 |
| 1382768 | 7351 | 7370 | N/A | N/A | ACAGAATTGTCCTGTATCTC | 55 | P | 1243 |
| 1382769 | 6317 | 6336 | N/A | N/A | GCCTGTCTGTCCTCTGCAGC | 101 | P | 1244 |
| 1382776 | 1781 | 1800 | N/A | N/A | CCCGAGCCGCCCTCCGCGCC | 86 | P | 1245 |
| 1382777 | 3578 | 3597 | N/A | N/A | TGTCCTTTTTGATGAGATCC | 65 | P | 1246 |
| 1382778 | 1132 | 1151 | N/A | N/A | ATCCTTCATATTTTCCACCA | 108 | P | 1247 |

### Example 2: Effect of 3-10-3 cET Modified Oligonucleotides with Uniform Phosphorothioate Internucleoside Linkages on Human DMPK In Vitro, Single Dose

[0342] Modified oligonucleotides complementary to human DMPK nucleic acid were synthesized and tested for their effect on DMPK RNA levels in vitro. The results are presented in the tables below.

[0343] The modified oligonucleotides in the tables below are 3-10-3 cEt modified oligonucleotides with uniform phosphorothioate internucleoside linkages. The modified oligonucleotides are 16 nucleosides in length. The sugar motif for the modified oligonucleotides is (from 5′ to 3′): kkkddddddddddkkk; wherein each ‘d’ represents a 2′-β-D-deoxyribosyl sugar moiety, and each ‘k’ represents a cEt sugar moiety. The internucleoside linkage motif for the modified oligonucleotides is (from 5′ to 3′): sssssssssssssss wherein each ‘s’ represents a phosphorothioate internucleoside linkage. All cytosine nucleobases are 5-methylcytosines.

[0344] “Start site” indicates the 5′-most nucleoside of the target sequence to which the modified oligonucleotide is complementary. “Stop site” indicates the 3′-most nucleoside of the target sequence to which the modified oligonucleotide is complementary. As shown in the tables below, the modified oligonucleotides are complementary to SEQ TD NO: 1 (the complement of GENBANK Accession No. NT_011109.16, truncated from nucleotides 18539000 to 18566000), SEQ ID NO: 2 (GENBANK Accession No. NM_004409.4), SEQ ID NO: 3 (the complement of GENBANK Accession No. NC_000019.10, truncated from nucleosides 45767001 to 45786000), SEQ ID NO: 4 (GENBANK Accession No. NM_001288764.1), and/or SEQ ID NO: 5 (GENBANK Accession No. NM_001081560.2). ‘N/A’ indicates that the modified oligonucleotide is not 100% complementary to that particular target sequence.

[0345] Cultured A431 cells at a density of 10,000 cells per well were treated with 2,000 nM of modified oligonucleotide by free uptake as indicated in the tables below. After a treatment period of approximately 48 hours. RNA was isolated from the cells and DMPK RNA levels were measured by quantitative real-time RTPCR. Human DMPK primer probe set RTS38095 (forward nucleobase sequence CTGAGCCGGGAGATGGA, designated herein as SEQ TD NO: 6; reverse nucleobase sequence GGACGTGTGCCTCTAGGT, designated herein as SEQ ID NO: 7; probe nucleobase sequence TGACTGGCGAAGTTCTGGTTGTCC, designated herein as SEQ ID NO: 8) was used to measure DMPK RNA levels. DMPK RNA levels were normalized to total RNA content, as measured by RIBOGREEN®. Results are presented as percent of DMPK RNA, relative to the amount in untreated control cells (% UTC). The values marked by the symbol “†” indicate that the modified oligonucleotide is complementary to the amplicon region of the primer probe set. Additional assays may be used to measure the activity of the modified oligonucleotides complementary to the amplicon region. ‘N.D.’ in the tables below refers to instances where the value was Not Defined.

[0346] Each separate experiment described in this example is identified by an Assay Identification letter in the table column labeled “AID”.

TABLE 3
Reduction of DMPK RNA by 3-10-3 cEt modified oligonucleotides with uniform phosphorothioate
internucleoside linkages at a dose of 2,000 nM

| | SEQ ID | SEQ ID | SEQ ID | SEQ ID | | | | |
|---|---|---|---|---|---|---|---|---|
| | NO: 1 | NO: 1 | NO: 2 | NO: 2 | | | | |
| Compound | Start | Stop | Start | Stop | Nucleobase Sequence | DMPK | | SEQ ID |
| No. | Site | Site | Site | Site | (5′ to 3′) | (%UTC) | AID | NO |
| 569664 | 19498 | 19513 | 1359 | 1374 | TCCCGAATGTCCGACA | 16 | Q | 1337 |
| 570781 | 20812 | 20827 | N/A | N/A | TGGAATCTATCATGGC | 9 | Q | 1338 |
| 570785 | 20884 | 20899 | N/A | N/A | TTGTGATAAGCAATGC | 0.3 | Q | 1339 |
| 570786 | 20886 | 20901 | N/A | N/A | ACTTGTGATAAGCAAT | 5 | Q | 1340 |
| 570787 | 20888 | 20903 | N/A | N/A | TTACTTGTGATAAGCA | 1 | Q | 1341 |
| 570880 | 21991 | 22006 | N/A | N/A | GGTTTCTGTCTGCTTC | 5 | Q | 1343 |
| 570883 | 21994 | 22009 | N/A | N/A | CGTGGTTTCTGTCTGC | 8 | Q | 1344 |
| 1002463 | 16983 | 16998 | 1136 | 1151 | GCTGAATGAAGTCTCG | 22 | Q | 1345 |
| 1002510 | 24091 | 24106 | 2149 | 2164 | GGCTTCTGTGCCGTGC | 95 | Q | 1346 |
| 1002598 | 14185 | 14200 | N/A | N/A | CTAGATTCAGATGCAG | 14 | Q | 1347 |
| 1002623 | 14486 | 14501 | N/A | N/A | CGTGTAAGGTTCTGGG | 11 | Q | 1348 |
| 1002656 | 14982 | 14997 | N/A | N/A | GTCGAGATAGTGAGAC | 102 | Q | 1349 |
| 1002707 | 13157 | 13172 | N/A | N/A | GCGGAAGCATCCTCCT | 83 | Q | 1350 |
| 1002727 | 13331 | 13346 | N/A | N/A | AACAAGTGTCACACAC | 18 | Q | 1351 |
| 1002849 | 15743 | 15758 | N/A | N/A | ATAACCATAGAGATCT | 30 | Q | 1352 |
| 1002919 | 17243 | 17258 | N/A | N/A | AACTTTATGGAGGGAG | 27 | Q | 1353 |
| 1002931 | 17320 | 17335 | N/A | N/A | TAGTAGATGGGCACAG | 13 | Q | 1354 |
| 1002937 | 17392 | 17407 | N/A | N/A | GGCCTTACTGTCTGAA | 105 | Q | 1355 |
| 1002989 | 19409 | 19424 | N/A | N/A | GCTTACATGTTCCCCC | 7 | Q | 1356 |
| 1003045 | 20712 | 20727 | N/A | N/A | GCCTGGCACGATTTTT | 93 | Q | 1357 |
| 1003066 | 21096 | 21111 | N/A | N/A | GTGTAATGTTGTCCAG | 1 | Q | 1358 |
| 1003078 | 21118 | 21133 | N/A | N/A | CATTAATGATAAGGTA | 44 | Q | 1359 |
| 1003105 | 21234 | 21249 | N/A | N/A | GGGAACACGGCTCAGG | 32 | Q | 1360 |
| 1003124 | 21490 | 21505 | N/A | N/A | TTCTAGGGTCAGCTCA | 12 | Q | 1361 |
| 1003161 | 22094 | 22109 | N/A | N/A | AAAGATCGACTTCTCA | 14 | Q | 1362 |
| 1003178 | 22234 | 22249 | N/A | N/A | CAGGAATGATTCAGCC | 2 | Q | 1363 |
| 1003199 | 22382 | 22397 | N/A | N/A | CTAAATCTACACAGGG | 47 | Q | 1364 |
| 1003250 | 23250 | 23265 | N/A | N/A | CCCTATATCTGGACGG | 71 | Q | 1365 |
| 1003291 | 23717 | 23732 | N/A | N/A | TCGAATCCCGTCCGAA | 90 | Q | 1366 |
| 1016696 | 12012 | 12027 | 45 | 60 | TCTCTCTGCGGCCGGC | 42 | Q | 1367 |
| 1016700 | 15989 | 16004 | 743 | 7 58 | AGTCTATGGCCATGAC | 64 | Q | 1368 |
| 1016717 | 24450 | 24465 | 2508 | 2523 | TGCACTTTGCGAACCA | 30 | Q | 1369 |
| 1016723 | 13959 | 13974 | N/A | N/A | ATGTTAAACTGGGCAG | 9 | Q | 1370 |
| 1016729 | 14033 | 14048 | N/A | N/A | GGAGTGCTTTAGTCCT | 27 | Q | 1371 |
| 1016754 | 8817 | 8832 | N/A | N/A | GATCTTCTTGCACACA | 37 | Q | 1372 |
| 1016766 | 8966 | 8981 | N/A | N/A | CCACGAAAGGTCCTGC | 28 | Q | 1373 |
| 1016778 | 9088 | 9103 | N/A | N/A | CACTCTAAGGATCTGA | 15 | Q | 1374 |
| 1016790 | 9360 | 9375 | N/A | N/A | TCAGATCCTGAGTCCC | 39 | Q | 1375 |
| 1016802 | 9574 | 9589 | N/A | N/A | ACAAGATGCCAGGCCT | 16 | Q | 1376 |
| 1016814 | 9689 | 9704 | N/A | N/A | GGACTCTACGATTCCA | 55 | Q | 1377 |
| 1016826 | 9872 | 9887 | N/A | N/A | TACCTCTACCACTGAC | 30 | Q | 1378 |
| 1016838 | 10051 | 10066 | N/A | N/A | CATCTTAGCTAGCTTC | 15 | Q | 1379 |
| 1016850 | 10281 | 10296 | N/A | N/A | CGATATCCATGGCTTC | 11 | Q | 1380 |
| 1016862 | 10372 | 10387 | N/A | N/A | CCATCATGGTTAGTCT | 12 | Q | 1381 |
| 1016874 | 10446 | 10461 | N/A | N/A | TTACATCGCCCGTGTC | 43 | Q | 1382 |
| 1016886 | 10553 | 10568 | N/A | N/A | ACCAGTCACATGCTGG | 47 | Q | 1383 |
| 1016898 | 10812 | 10827 | N/A | N/A | TACATCATCTCCTCCG | 21 | Q | 1384 |
| 1016910 | 11019 | 11034 | N/A | N/A | GGCAGGATGCTCTTCT | 19 | Q | 1385 |
| 1016922 | 11539 | 11554 | N/A | N/A | GCTTTATACCAGCTTT | 10 | Q | 1386 |
| 1016934 | 11864 | 11879 | N/A | N/A | GGGAATGCATGGAGAA | 25 | Q | 1387 |
| 1016942 | 12594 | 12609 | N/A | N/A | GCTGTTGGCAGCCTAG | 74 | Q | 1388 |
| 1016951 | 13619 | 13634 | N/A | N/A | TGCAGCTCGGGCCACA | 69 | Q | 1389 |
| 1016957 | 14811 | 14826 | N/A | N/A | TCAATTTCTAAGGCCC | 71 | Q | 1390 |
| 1016965 | 15368 | 15383 | N/A | N/A | GACTTTCCCACAGACG | 19 | Q | 1391 |
| 1016969 | 15481 | 15496 | N/A | N/A | CATCTTTATAAGAGTC | 28 | Q | 1392 |
| 1016980 | 16123 | 16138 | N/A | N/A | CCAACCAAGAAGGTCC | 97 | Q | 1393 |
| 1016985 | 16300 | 16315 | N/A | N/A | GTTTGATGTCCCTGCA | 34 | Q | 1394 |
| 1016991 | 16530 | 16545 | N/A | N/A | GGTCTAATACTCCGCC | 46 | Q | 1395 |
| 1017017 | 17621 | 17636 | N/A | N/A | CCAGTATTGTTCAGCA | 2 | Q | 1396 |
| 1017025 | 17739 | 17754 | N/A | N/A | TCTTGTATCCTGTTGC | 1 | Q | 1397 |
| 1017038 | 19712 | 19727 | N/A | N/A | GGTCCTCCAACTCTGG | 39 | Q | 1398 |
| 1017041 | 19802 | 19817 | N/A | N/A | TGGTTACAAGATTCTG | 1 | Q | 1399 |
| 1017049 | 19918 | 19933 | N/A | N/A | TATATGGCTGATTCAA | 6 | Q | 1400 |
| 1017058 | 20942 | 20957 | N/A | N/A | ATCTGGTGAGCTCACG | 36 | Q | 1401 |
| 1017085 | 21872 | 21887 | N/A | N/A | TACTGTTTCATCCTGT | 56 | Q | 1402 |
| 1017093 | 22002 | 22017 | N/A | N/A | CGTCTCTCCGTGGTTT | 6 | Q | 1403 |
| 1017115 | 22498 | 22513 | N/A | N/A | TGTTTATCCCCTACTC | 87 | Q | 1404 |
| 1017124 | 22951 | 22966 | N/A | N/A | GGGACTCACCTGTGGC | 117 | Q | 1405 |
| 1017144 | 24907 | 24922 | N/A | N/A | TCGCATCCCGCTAGCT | 91 | Q | 1406 |
| 1017156 | 25216 | 25231 | N/A | N/A | GGAATTCCCGGCTCCG | 92 | Q | 1407 |
| 1017168 | 25479 | 25494 | N/A | N/A | TGTGTGTCCGTCCCCC | 163 | Q | 1408 |
| 1017180 | 25660 | 25675 | N/A | N/A | GCAACTTTGGGAAGTT | 90 | Q | 1409 |
| 1017192 | 26179 | 26194 | N/A | N/A | CCTCATGGTAGCGCGC | 128 | Q | 1410 |
| 1017204 | 26277 | 26292 | N/A | N/A | TGTCTCCTCGCCGTCC | 93 | Q | 1411 |
| 1017216 | 26601 | 26616 | N/A | N/A | GAGATTGTGAGCTGGT | 106 | Q | 1412 |
| 1017228 | 26849 | 26864 | N/A | N/A | GTGGGTAAGAGTAACG | 84 | Q | 1413 |
| 569664 | 19498 | 19513 | 1359 | 1374 | TCCCGAATGTCCGACA | 21 | R | 1337 |
| 570767 | 19665 | 19680 | N/A | N/A | AGGTTCCAAGACTGAT | 11 | R | 1415 |
| 570776 | 19713 | 19728 | N/A | N/A | AGGTCCTCCAACTCTG | 30 | R | 1416 |
| 570796 | 21049 | 21064 | N/A | N/A | TCTTAGACAAAGTAGC | 6 | R | 1417 |
| 570884 | 21995 | 22010 | N/A | N/A | CCGTGGTTTCTGTCTG | 10 | R | 1418 |
| 570901 | 22206 | 22221 | V/A | N/A | AGGAACAAATCAGGAT | 4.4† | R | 1419 |
| 1002436 | 15990 | 16005 | 744 | 759 | GAGTCTATGGCCATGA | 37 | R | 1420 |
| 1002464 | 16984 | 16999 | 1137 | 1152 | CGCTGAATGAAGTCTC | 22 | R | 1421 |
| 1002599 | 14186 | 14201 | N/A | N/A | TCTAGATTCAGATGCA | 36 | R | 1422 |
| 1002628 | 14496 | 14511 | N/A | N/A | ACATAAACACCGTGTA | 67 | R | 1423 |
| 1002716 | 13266 | 13281 | N/A | N/A | ACATATGAGGGCCAGA | 17 | R | 1424 |
| 1002728 | 13333 | 13348 | N/A | N/A | GAAACAAGTGTCACAC | 20 | R | 1425 |
| 1002751 | 13624 | 13639 | N/A | N/A | CGAGATGCAGCTCGGG | 46 | R | 1426 |
| 1002777 | 14813 | 14828 | N/A | N/A | CATCAATTTCTAAGGC | 65 | R | 1427 |
| 1002799 | 15382 | 15397 | N/A | N/A | TCTTACCGCACACAGA | 73 | R | 1428 |
| 1002826 | 15521 | 15536 | N/A | N/A | ACCTATCCCATTCCAG | 14 | R | 1429 |
| 1002852 | 15746 | 15761 | N/A | N/A | GAGATAACCATAGAGA | 12 | R | 1430 |
| 1002920 | 17244 | 17259 | N/A | N/A | CAACTTTATGGAGGGA | 17 | R | 1431 |
| 1003014 | 19719 | 19734 | N/A | N/A | AATTTAAGGTCCTCCA | 11 | R | 1432 |
| 1003033 | 19920 | 19935 | N/A | N/A | GTTATATGGCTGATTC | 6 | R | 1332 |
| 1003079 | 21119 | 21134 | N/A | N/A | TCATTAATGATAAGGT | 3 | R | 1433 |
| 1003109 | 21276 | 21291 | N/A | N/A | GTATGAAGTGGCTGTC | 36 | R | 1434 |
| 1003162 | 22095 | 22110 | N/A | N/A | CAAAGATCGACTTCTC | 8 | R | 1435 |
| 1003179 | 22235 | 22250 | N/A | N/A | TCAGGAATGATTCAGC | 3 | R | 1436 |
| 1003200 | 22383 | 22398 | N/A | N/A | TCTAAATCTACACAGG | 72 | R | 1437 |
| 1016697 | 14688 | 14703 | 398 | 413 | CGTCCCTCTGCAGTCG | 34 | R | 1438 |
| 1016711 | 24117 | 24132 | 2175 | 2190 | GTTGTGAACTGGCAGG | 12 | R | 1439 |
| 1016718 | 24455 | 24470 | 2513 | 2528 | AGCTTTGCACTTTGCG | 64 | R | 1440 |
| 1016724 | 13961 | 13976 | N/A | N/A | GAATGTTAAACTGGGC | 11 | R | 1441 |
| 1016730 | 14034 | 14049 | N/A | N/A | AGGAGTGCTTTAGTCC | 39 | R | 1442 |
| 1016743 | 8568 | 8583 | N/A | N/A | GAATGGTGTGCCAGGC | 39 | R | 1443 |
| 1016755 | 8819 | 8834 | N/A | N/A | GCGATCTTCTTGCACA | 55 | R | 1444 |
| 1016767 | 8971 | 8986 | N/A | N/A | TCTTCCCACGAAAGGT | 58 | R | 1445 |
| 1016779 | 9150 | 9165 | N/A | N/A | TCCTAGCTGGCTCTCA | 23 | R | 1446 |
| 1016791 | 9392 | 9407 | N/A | N/A | GGGATTCCCAGCCTGT | 90 | R | 1447 |
| 1016803 | 9579 | 9594 | N/A | N/A | AACTTACAAGATGCCA | 12 | R | 1448 |
| 1016815 | 9697 | 9712 | N/A | N/A | GGGACTCAGGACTCTA | 82 | R | 1449 |
| 1016827 | 9929 | 9944 | N/A | N/A | TCCCTTCTAACTTGGG | 94 | R | 1450 |
| 1016839 | 10053 | 10068 | N/A | N/A | TGCATCTTAGCTAGCT | 72 | R | 1451 |
| 1016851 | 10282 | 10297 | N/A | N/A | CCGATATCCATGGCTT | 18 | R | 1452 |
| 1016863 | 10373 | 10388 | N/A | N/A | TCCATCATGGTTAGTC | 13 | R | 1453 |
| 1016875 | 10447 | 10462 | N/A | N/A | ATTACATCGCCCGTGT | 29 | R | 1454 |
| 1016887 | 10556 | 10571 | N/A | N/A | GTGACCAGTCACATGC | 41 | R | 1455 |
| 1016899 | 10818 | 10833 | N/A | N/A | GTCCTCTACATCATCT | 20 | R | 1456 |
| 1016911 | 11120 | 11135 | N/A | N/A | GACCGAGGAGTCCCAG | 75 | R | 1457 |
| 1016923 | 11540 | 11555 | N/A | N/A | TGCTTTATACCAGCTT | 18 | R | 1458 |
| 1016935 | 12329 | 12344 | N/A | N/A | GTAGGCACTCACCCCA | 76 | R | 1459 |
| 1016943 | 12595 | 12610 | N/A | N/A | GGCTGTTGGCAGCCTA | 126 | R | 1460 |
| 1016981 | 16169 | 16184 | N/A | N/A | GCTTCTACAGTTCTGA | 71 | R | 1461 |
| 1016986 | 16394 | 16409 | N/A | N/A | CACTGGCTCACCGTTC | 89 | R | 1462 |
| 1016992 | 16531 | 16546 | N/A | N/A | TGGTCTAATACTCCGC | 60 | R | 1463 |
| 1017004 | 17321 | 17336 | N/A | N/A | GTAGTAGATGGGCACA | 10 | R | 1464 |
| 1017013 | 17408 | 17423 | N/A | N/A | GCCCTGATCACTCTGG | 124 | R | 1465 |
| 1017018 | 17622 | 17637 | N/A | N/A | CCCAGTATTGTTCAGC | 5 | R | 1466 |
| 1017026 | 17740 | 17755 | N/A | N/A | TTCTTGTATCCTGTTG | 4 | R | 1467 |
| 1017032 | 19411 | 19426 | N/A | N/A | TGGCTTACATGTTCCC | 40 | R | 1468 |
| 1017042 | 19803 | 19818 | N/A | N/A | ATGGTTACAAGATTCT | 0.3 | R | 1469 |
| 1017054 | 20809 | 20824 | N/A | N/A | AATCTATCATGGCTCA | 7 | R | 1470 |
| 1017059 | 20944 | 20959 | N/A | N/A | CCATCTGGTGAGCTCA | 76 | R | 1471 |
| 1017066 | 21097 | 21112 | N/A | N/A | TGTGTAATGTTGTCCA | 3 | R | 1472 |
| 1017077 | 21491 | 21506 | N/A | N/A | GTTCTAGGGTCAGCTC | 7 | R | 1473 |
| 1017086 | 21874 | 21889 | N/A | N/A | CTTACTGTTTCATCCT | 75 | R | 1474 |
| 1017094 | 22016 | 22031 | N/A | N/A | GTCTGAAGTAACCTCG | 9 | R | 1475 |
| 1017116 | 22504 | 22519 | N/A | N/A | AATCCTTGTTTATCCC | 20 | R | 1476 |
| 1017125 | 22958 | 22973 | N/A | N/A | CACATGAGGGACTCAC | 71 | R | 1477 |
| 1017128 | 23288 | 23303 | N/A | N/A | GGCTTCTGCCCTCTAA | 98 | R | 1478 |
| 1017135 | 23736 | 23751 | N/A | N/A | GTTAGTCCACTCGCAC | 21 | R | 1479 |
| 1017145 | 24920 | 24935 | N/A | N/A | TGATTCGGCCGCTTCG | 97 | R | 1480 |
| 1017157 | 25217 | 25232 | N/A | N/A | CGGAATTCCCGGCTCC | 73 | R | 1481 |
| 1017169 | 25482 | 25497 | N/A | N/A | TTGTGTGTGTCCGTCC | 240 | R | 1482 |
| 1017181 | 25671 | 25686 | N/A | N/A | AGCCATGTTTTGCAAC | 82 | R | 1483 |
| 1017193 | 26223 | 26238 | N/A | N/A | ATACTTGTCCACTGCG | 76 | R | 1484 |
| 1017205 | 26280 | 26295 | N/A | N/A | GACTGTCTCCTCGCCG | 114 | R | 1485 |
| 1017217 | 26602 | 26617 | N/A | N/A | TGAGATTGTGAGCTGG | 154 | R | 1486 |
| 1017229 | 26912 | 26927 | N/A | N/A | CGTTTCACAACAAAGG | 88 | R | 1487 |
| 569664 | 19498 | 19513 | 1359 | 1374 | TCCCGAATGTCCGACA | 17 | S | 1337 |
| 570745 | 19410 | 19425 | N/A | N/A | GGCTTACATGTTCCCC | 29 | S | 1491 |
| 570784 | 20882 | 20897 | N/A | N/A | GTGATAAGCAATGCAT | 2 | S | 1492 |
| 570794 | 21045 | 21060 | N/A | N/A | AGACAAAGTAGCATGA | 11 | S | 1493 |
| 570795 | 21047 | 21062 | N/A | N/A | TTAGACAAAGTAGCAT | 3 | S | 1494 |
| 1002421 | 15001 | 15016 | 456 | 471 | TTCACTACCGCTACCT | 17 | S | 1495 |
| 1002590 | 14086 | 14101 | N/A | N/A | ACATATCCCAGACTCA | 16 | S | 1496 |
| 1002602 | 14223 | 14238 | N/A | N/A | TGGGTAACGGCCCAGA | 70 | S | 1497 |
| 1002629 | 14497 | 14512 | N/A | N/A | CACATAAACACCGTGT | 97 | S | 1498 |
| 1002679 | 12694 | 12709 | N/A | N/A | GGCCATAGAGCCCACT | 90 | S | 1499 |
| 1002717 | 13267 | 13282 | N/A | N/A | GACATATGAGGGCCAG | 17 | S | 1500 |
| 1002729 | 13335 | 13350 | N/A | N/A | AGGAAACAAGTGTCAC | 16 | S | 1501 |
| 1002752 | 13625 | 13640 | N/A | N/A | GCGAGATGCAGCTCGG | 51 | S | 1502 |
| 1002778 | 14825 | 14840 | N/A | N/A | GGCTCGGTCATTCATC | 55 | S | 1503 |
| 1002800 | 15384 | 15399 | N/A | N/A | CCTCTTACCGCACACA | 17 | S | 1504 |
| 1002831 | 15549 | 15564 | N/A | N/A | GGCAGTGGCCCCGTTA | 41 | S | 1505 |
| 1002853 | 15747 | 15762 | N/A | N/A | AGAGATAACCATAGAG | 10 | S | 1506 |
| 1002875 | 16170 | 16185 | N/A | N/A | GGCTTCTACAGTTCTG | 103 | S | 1507 |
| 1002975 | 17919 | 17934 | N/A | N/A | AGTATACAGGCATGCG | 30 | S | 1508 |
| 1003015 | 19723 | 19738 | N/A | N/A | TGAAAATTTAAGGTCC | 11 | S | 1509 |
| 1003080 | 21120 | 21135 | N/A | N/A | TTCATTAATGATAAGG | 2 | S | 1510 |
| 1003140 | 21879 | 21894 | N/A | N/A | ACCAACTTACTGTTTC | 83 | S | 1511 |
| 1003156 | 22038 | 22053 | N/A | N/A | GTAACTACAGAGACCG | 16 | S | 1512 |
| 1003163 | 22096 | 22111 | N/A | N/A | TCAAAGATCGACTTCT | 20 | S | 1513 |
| 1003183 | 22299 | 22314 | N/A | N/A | CCCTAATGCCCTCACG | 31 | S | 1514 |
| 1003231 | 22959 | 22974 | N/A | N/A | ACACATGAGGGACTCA | 96 | S | 1515 |
| 1003256 | 23299 | 23314 | N/A | N/A | GCTGAATAAAGGGCTT | 109 | S | 1516 |
| 1016701 | 15999 | 16014 | 753 | 768 | CGGTGCACCGAGTCTA | 156 | S | 1517 |
| 1016712 | 24121 | 24136 | 2179 | 2194 | AGCGGTTGTGAACTGG | 16 | S | 1518 |
| 1016719 | 24456 | 24471 | 2514 | 2529 | AAGCTTTGCACTTTGC | 48 | S | 1519 |
| 1016725 | 13962 | 13977 | N/A | N/A | GGAATGTTAAACTGGG | 9 | S | 1520 |
| 1016744 | 8569 | 8584 | N/A | N/A | TGAATGGTGTGCCAGG | 26 | S | 1521 |
| 1016756 | 8820 | 8835 | N/A | N/A | GGCGATCTTCTTGCAC | 44 | S | 1522 |
| 1016768 | 9007 | 9022 | N/A | N/A | GACAGCAACAAAGCCC | 12 | S | 1523 |
| 1016780 | 9155 | 9170 | N/A | N/A | CCAATTCCTAGCTGGC | 73 | S | 1524 |
| 1016792 | 9464 | 9479 | N/A | N/A | GATGAGTTGGAGGTCA | 20 | S | 1525 |
| 1016804 | 9580 | 9595 | N/A | N/A | GAACTTACAAGATGCC | 15 | S | 1526 |
| 1016816 | 9703 | 9718 | N/A | N/A | GTTCTAGGGACTCAGG | 11 | S | 1527 |
| 1016828 | 9940 | 9955 | N/A | N/A | GAAACTGGAGCTCCCT | 25 | S | 1528 |
| 1016840 | 10054 | 10069 | N/A | N/A | TTGCATCTTAGCTAGC | 57 | S | 1529 |
| 1016852 | 10283 | 10298 | N/A | N/A | CCCGATATCCATGGCT | 19 | S | 1530 |
| 1016864 | 10374 | 10389 | N/A | N/A | ATCCATCATGGTTAGT | 13 | S | 1531 |
| 1016876 | 10449 | 10464 | N/A | N/A | CTATTACATCGCCCGT | 35 | S | 1532 |
| 1016888 | 10559 | 10574 | N/A | N/A | GGAGTGACCAGTCACA | 15 | S | 1533 |
| 1016900 | 10830 | 10845 | N/A | N/A | GTACACACACAGGTCC | 16 | S | 1534 |
| 1016912 | 11139 | 11154 | N/A | N/A | TGAGAAACTAGGAGGC | 12 | S | 1535 |
| 1016924 | 11712 | 11727 | N/A | N/A | CTTGCTCCCGACAAGC | 71 | S | 1536 |
| 1016936 | 12330 | 12345 | N/A | N/A | GGTAGGCACTCACCCC | 83 | S | 1537 |
| 1016987 | 16396 | 16411 | N/A | N/A | GGCACTGGCTCACCGT | 82 | S | 1538 |
| 1016993 | 16554 | 16569 | N/A | N/A | AATGCTTAGCCCCTCC | 36 | S | 1539 |
| 1016998 | 17245 | 17260 | N/A | N/A | CCAACTTTATGGAGGG | 70 | S | 1540 |
| 1017005 | 17322 | 17337 | N/A | N/A | AGTAGTAGATGGGCAC | 1 | S | 1541 |
| 1017014 | 17425 | 17440 | N/A | N/A | TGCACTCCATTGTCTC | 28 | S | 1542 |
| 1017019 | 17641 | 17656 | N/A | N/A | ATCTGGTCCGTGCTGG | 52 | S | 1543 |
| 1017033 | 19423 | 19438 | N/A | N/A | GCTTTTTGATCTTGGC | 26 | S | 1544 |
| 1017043 | 19804 | 19819 | N/A | N/A | AATGGTTACAAGATTC | 6 | S | 1545 |
| 1017055 | 20811 | 20826 | N/A | N/A | GGAATCTATCATGGCT | 4 | S | 1546 |
| 1017060 | 20945 | 20960 | N/A | N/A | GCCATCTGGTGAGCTC | 60 | S | 1547 |
| 1017067 | 21098 | 21113 | N/A | N/A | ATGTGTAATGTTGTCC | 1 | S | 1333 |
| 1017071 | 21277 | 21292 | N/A | N/A | GGTATGAAGTGGCTGT | 31 | S | 1548 |
| 1017078 | 21493 | 21508 | N/A | N/A | ATGTTCTAGGGTCAGC | 7 | S | 1549 |
| 1017107 | 22386 | 22401 | N/A | N/A | TCCTCTAAATCTACAC | 77 | S | 1550 |
| 1017117 | 22507 | 22522 | N/A | N/A | AGGAATCCTTGTTTAT | 88 | S | 1551 |
| 1017136 | 23743 | 23758 | N/A | N/A | AGCTGTTGTTAGTCCA | 15 | S | 1552 |
| 1017146 | 24999 | 25014 | N/A | N/A | GGTGCCTCCGGGTGGC | 90 | S | 1553 |
| 1017158 | 25250 | 25265 | N/A | N/A | CACATTCCCCATCTCG | 106 | S | 1554 |
| 1017170 | 25503 | 25518 | N/A | N/A | TCCACTCGGGTCTCTG | 98 | S | 1555 |
| 1017182 | 25673 | 25688 | N/A | N/A | GTAGCCATGTTTTGCA | 123 | S | 1556 |
| 1017194 | 26224 | 26239 | N/A | N/A | GATACTTGTCCACTGC | 84 | S | 1557 |
| 1017206 | 26283 | 26298 | N/A | N/A | GTAGACTGTCTCCTCG | 107 | S | 1558 |
| 1017218 | 26633 | 26648 | N/A | N/A | CCACACTTAGTCCCCG | 128 | S | 1559 |
| 1017230 | 26938 | 26953 | N/A | N/A | GGGAAACCGGAGCTGG | 96 | S | 1560 |
| 569401 | 15164 | 15179 | 540 | 555 | CGGAAGCACGACACCT | 60 | T | 1561 |
| 569664 | 19498 | 19513 | 1359 | 1374 | TCCCGAATGTCCGACA | 18 | T | 1337 |
| 570586 | 15647 | 15662 | N/A | N/A | TGTCACTGGGCAGATT | 33 | T | 1562 |
| 570780 | 20810 | 20825 | N/A | N/A | GAATCTATCATGGCTC | 14 | T | 1564 |
| 570958 | 23316 | 23331 | N/A | N/A | ACGGAGGGAGATCTGG | 46 | T | 1565 |
| 570968 | 23354 | 23369 | N/A | N/A | ATCTAGGGAGATCCCG | 49 | T | 1566 |
| 1002423 | 15004 | 15019 | 459 | 474 | ATCTTCACTACCGCTA | 15 | T | 1567 |
| 1002549 | 24468 | 24483 | 2526 | 2541 | TCATGCACAAGAAAGC | 43 | T | 1568 |
| 1002579 | 13963 | 13978 | N/A | N/A | AGGAATGTTAAACTGG | 11 | T | 1569 |
| 1002630 | 14498 | 14513 | N/A | N/A | CCACATAAACACCGTG | 52 | T | 1570 |
| 1002683 | 12907 | 12922 | N/A | N/A | CTGGATCGCAGAGGAG | 18 | T | 1571 |
| 1002718 | 13268 | 13283 | N/A | N/A | AGACATATGAGGGCCA | 26 | T | 1572 |
| 1002730 | 13337 | 13352 | N/A | N/A | ACAGGAAACAAGTGTC | 53 | T | 1573 |
| 1002753 | 13626 | 13641 | N/A | N/A | CGCGAGATGCAGCTCG | 78 | T | 1574 |
| 1002781 | 14832 | 14847 | N/A | N/A | GTTCTAAGGCTCGGTC | 34 | T | 1575 |
| 1002833 | 15577 | 15592 | N/A | N/A | AGAATAGGTCCCAGAC | 23 | T | 1576 |
| 1002900 | 16557 | 16572 | N/A | N/A | CCAAATGCTTAGCCCC | 64 | T | 1577 |
| 1002923 | 17252 | 17267 | N/A | N/A | CCTTACTCCAACTTTA | 34 | T | 1578 |
| 1002966 | 17644 | 17659 | N/A | N/A | CTCATCTGGTCCGTGC | 49 | T | 1579 |
| 1003016 | 19724 | 19739 | N/A | N/A | CTGAAAATTTAAGGTC | 17 | T | 1580 |
| 1003028 | 19807 | 19822 | N/A | N/A | GTTAATGGTTACAAGA | 3 | T | 1581 |
| 1003059 | 20946 | 20961 | N/A | N/A | TGCCATCTGGTGAGCT | 112 | T | 1582 |
| 1003081 | 21121 | 21136 | N/A | N/A | GTTCATTAATGATAAG | 6 | T | 1583 |
| 1003110 | 21278 | 21293 | N/A | N/A | GGGTATGAAGTGGCTG | 84 | T | 1584 |
| 1003164 | 22097 | 22112 | N/A | N/A | CTCAAAGATCGACTTC | 10 | T | 1585 |
| 1003209 | 22509 | 22524 | N/A | N/A | CTAGGAATCCTTGTTT | 73 | T | 1586 |
| 1003241 | 23017 | 23032 | N/A | N/A | TCTATACACGCCCCGC | 36 | T | 1587 |
| 1003257 | 23300 | 23315 | N/A | N/A | GGCTGAATAAAGGGCT | 97 | T | 1588 |
| 1016702 | 16763 | 16778 | 992 | 1007 | CGAATACACCCAGCGC | 62 | T | 1589 |
| 1016704 | 19494 | 19509 | 1355 | 1370 | GAATGTCCGACAGTGT | 7 | T | 1590 |
| 1016713 | 24161 | 24176 | 2219 | 2234 | CGGATCACAGGACTGG | 29 | T | 1591 |
| 1016731 | 14087 | 14102 | N/A | N/A | CACATATCCCAGACTC | 8 | T | 1592 |
| 1016737 | 14274 | 14289 | N/A | N/A | CAGTTCAGGTGCAGCC | 15 | T | 1593 |
| 1016745 | 8570 | 8585 | N/A | N/A | CTGAATGGTGTGCCAG | 73 | T | 1594 |
| 1016757 | 8848 | 8863 | N/A | N/A | GGAACAGGAGGACTGT | 60 | T | 1595 |
| 1016769 | 9052 | 9067 | N/A | N/A | TAAGATTTCCCTGGCT | 35 | T | 1596 |
| 1016781 | 9168 | 9183 | N/A | N/A | AGCCTTGGATGCCCCA | 53 | T | 1597 |
| 1016793 | 9466 | 9481 | N/A | N/A | GTGATGAGTTGGAGGT | 19 | T | 1598 |
| 1016805 | 9581 | 9596 | N/A | N/A | CGAACTTACAAGATGC | 11 | T | 1599 |
| 1016817 | 9704 | 9719 | N/A | N/A | AGTTCTAGGGACTCAG | 20 | T | 1600 |
| 1016829 | 9941 | 9956 | N/A | N/A | GGAAACTGGAGCTCCC | 81 | T | 1601 |
| 1016841 | 10059 | 10074 | N/A | N/A | GGAACTTGCATCTTAG | 13 | T | 1602 |
| 1016853 | 10321 | 10336 | N/A | N/A | GTTATGGCTAGGAGGC | 11 | T | 1603 |
| 1016865 | 10376 | 10391 | N/A | N/A | CCATCCATCATGGTTA | 27 | T | 1604 |
| 1016877 | 10450 | 10465 | N/A | N/A | GCTATTACATCGCCCG | 54 | T | 1605 |
| 1016889 | 10593 | 10608 | N/A | N/A | GGCTCTTGTGGCAGGG | 43 | T | 1606 |
| 1016901 | 10831 | 10846 | N/A | N/A | AGTACACACACAGGTC | 23 | T | 1607 |
| 1016913 | 11214 | 11229 | N/A | N/A | GGTGGACGGTTCTCCA | 40 | T | 1608 |
| 1016925 | 11748 | 11763 | N/A | N/A | CCAATTGAGGCTGAGT | 17 | T | 1609 |
| 1016937 | 12332 | 12347 | N/A | N/A | AGGGTAGGCACTCACC | 93 | T | 1610 |
| 1016966 | 15385 | 15400 | N/A | N/A | CCCTCTTACCGCACAC | 23 | T | 1611 |
| 1016973 | 15748 | 15763 | N/A | N/A | CAGAGATAACCATAGA | 19 | T | 1612 |
| 1016982 | 16196 | 16211 | N/A | N/A | CACTTCCTCGGGTTCC | 64 | T | 1613 |
| 1016988 | 16455 | 16470 | N/A | N/A | CGCTCCCACACTCTGT | 81 | T | 1614 |
| 1017006 | 17324 | 17339 | N/A | N/A | TCAGTAGTAGATGGGC | 1 | T | 1615 |
| 1017015 | 17489 | 17504 | N/A | N/A | ATAGCTCCCCACTCCA | 8 | T | 1616 |
| 1017027 | 18456 | 18471 | N/A | N/A | TCTCATGACCCACCGG | 54 | T | 1617 |
| 1017034 | 19480 | 19495 | N/A | N/A | GTCTCCTGCGCAAGAC | 95 | T | 1618 |
| 1017051 | 19926 | 19941 | N/A | N/A | CTTATTGTTATATGGC | 2 | T | 1619 |
| 1017056 | 20850 | 20865 | N/A | N/A | ACTTTTGTTGAGACCA | 3 | T | 1620 |
| 1017068 | 21100 | 21115 | N/A | N/A | GTATGTGTAATGTTGT | 0.4 | T | 1621 |
| 1017079 | 21494 | 21509 | N/A | N/A | CATGTTCTAGGGTCAG | 16 | T | 1622 |
| 1017087 | 21882 | 21897 | N/A | N/A | TCCACCAACTTACTGT | 109 | T | 1623 |
| 1017095 | 22042 | 22057 | N/A | N/A | CACTGTAACTACAGAG | 92 | T | 1624 |
| 1017104 | 22301 | 22316 | N/A | N/A | CTCCCTAATGCCCTCA | 56 | T | 1625 |
| 1017108 | 22387 | 22402 | N/A | N/A | GTCCTCTAAATCTACA | 70 | T | 1626 |
| 1017137 | 23744 | 23759 | N/A | N/A | CAGCTGTTGTTAGTCC | 76 | T | 1627 |
| 1017147 | 25139 | 25154 | N/A | N/A | TTTTCTCGAGCTTGCG | 94 | T | 1628 |
| 1017159 | 25284 | 25299 | N/A | N/A | CACGCCTCCGTCTCCA | 74 | T | 1629 |
| 1017171 | 25504 | 25519 | N/A | N/A | CTCCACTCGGGTCTCT | 111 | T | 1630 |
| 1017183 | 25674 | 25689 | N/A | N/A | GGTAGCCATGTTTTGC | 93 | T | 1631 |
| 1017195 | 26226 | 26241 | N/A | N/A | TCGATACTTGTCCACT | 86 | T | 1632 |
| 1017207 | 26285 | 26300 | N/A | N/A | CAGTAGACTGTCTCCT | 90 | T | 1633 |
| 1017219 | 26644 | 26659 | N/A | N/A | GCCTGTCCCGTCCACA | 82 | T | 1634 |
| 1017231 | 26945 | 26960 | N/A | N/A | GGTTACAGGGAAACCG | 102 | T | 1635 |
| 569393 | N/A | N/A | 532 | 547 | CGACACCTCGCCCCTC | 23 | U | 1636 |
| 569664 | 19498 | 19513 | 1359 | 1374 | TCCCGAATGTCCGACA | 17 | U | 1337 |
| 570888 | 22039 | 22054 | N/A | N/A | TGTAACTACAGAGACC | 25 | U | 1640 |
| 570970 | 23358 | 23373 | N/A | N/A | GGTTATCTAGGGAGAT | 20 | U | 1641 |
| 1002448 | 16764 | 16779 | 993 | 1008 | GCGAATACACCCAGCG | 65 | U | 1642 |
| 1002477 | 19496 | 19511 | 1357 | 1372 | CCGAATGTCCGACAGT | 3 | U | 1643 |
| 1002551 | 24502 | 24517 | 2560 | 2575 | AGAGATCGCGCCAGAC | 25 | U | 1644 |
| 1002582 | 13992 | 14007 | N/A | N/A | GGCCTCTCAGAAGTCA | 65 | U | 1645 |
| 1002664 | 12334 | 12349 | N/A | N/A | CGAGGGTAGGCACTCA | 99 | U | 1646 |
| 1002684 | 12909 | 12924 | N/A | N/A | TCCTGGATCGCAGAGG | 70 | U | 1647 |
| 1002719 | 13270 | 13285 | N/A | N/A | CCAGACATATGAGGGC | 36 | U | 1648 |
| 1002735 | 13461 | 13476 | N/A | N/A | GGCTGAATGGCCTGGC | 88 | U | 1649 |
| 1002756 | 13688 | 13703 | N/A | N/A | CCCTTTTAAGGCAGCA | 15 | U | 1650 |
| 1002834 | 15579 | 15594 | N/A | N/A | AGAGAATAGGTCCCAG | 8 | U | 1651 |
| 1002939 | 17493 | 17508 | N/A | N/A | TCAGATAGCTCCCCAC | 22 | U | 1652 |
| 1002993 | 19489 | 19504 | N/A | N/A | TCCGACAGTGTCTCCT | 14 | U | 1653 |
| 1003017 | 19734 | 19749 | N/A | N/A | GTACATAGATCTGAAA | 30 | U | 1654 |
| 1003029 | 19808 | 19823 | N/A | N/A | AGTTAATGGTTACAAG | 4 | U | 1655 |
| 1003034 | 19927 | 19942 | N/A | N/A | CCTTATTGTTATATGG | 39 | U | 1656 |
| 1003067 | 21101 | 21116 | N/A | N/A | AGTATGTGTAATGTTG | 1 | U | 1657 |
| 1003113 | 21332 | 21347 | N/A | N/A | AACTTGAGGTCAGCAC | 35 | U | 1658 |
| 1003242 | 23018 | 23033 | N/A | N/A | GTCTATACACGCCCCG | 26 | U | 1659 |
| 1016698 | 15007 | 15022 | 462 | 477 | TTCATCTTCACTACCG | 22 | U | 1660 |
| 1016714 | 24169 | 24184 | 2227 | 2242 | GGCGGGCCCGGATCAC | 103 | U | 1661 |
| 1016732 | 14089 | 14104 | N/A | N/A | GTCACATATCCCAGAC | 56 | U | 1662 |
| 1016738 | 14366 | 14381 | N/A | N/A | GTAACGGAGTCTGCAG | 44 | U | 1663 |
| 1016741 | N/A | N/A | 1342 | 1357 | TGTCTCCCCGCCCCCG | 46 | U | 1664 |
| 1016746 | 8571 | 8586 | N/A | N/A | GCTGAATGGTGTGCCA | 26 | U | 1665 |
| 1016758 | 8865 | 8880 | N/A | N/A | GATGATGCAGTCCTCC | 56 | U | 1666 |
| 1016770 | 9053 | 9068 | N/A | N/A | CTAAGATTTCCCTGGC | 26 | U | 1667 |
| 1016782 | 9228 | 9243 | N/A | N/A | TCGAGTGACAGGCAGT | 21 | U | 1668 |
| 1016794 | 9467 | 9482 | N/A | N/A | GGTGATGAGTTGGAGG | 17 | U | 1669 |
| 1016806 | 9595 | 9610 | N/A | N/A | CCCAAGACGAGCTCCG | 17 | U | 1670 |
| 1016818 | 9705 | 9720 | N/A | N/A | AAGTTCTAGGGACTCA | 51 | U | 1671 |
| 1016830 | 9991 | 10006 | N/A | N/A | GCGGATCCTGAGTGAG | 34 | U | 1672 |
| 1016842 | 10060 | 10075 | N/A | N/A | GGGAACTTGCATCTTA | 12 | U | 1673 |
| 1016854 | 10322 | 10337 | N/A | N/A | GGTTATGGCTAGGAGG | 11 | U | 1674 |
| 1016866 | 10378 | 10393 | N/A | N/A | GTCCATCCATCATGGT | 77 | U | 1675 |
| 1016878 | 10451 | 10466 | N/A | N/A | GGCTATTACATCGCCC | 110 | U | 1676 |
| 1016890 | 10683 | 10698 | N/A | N/A | AATAGCAAGGGCAGCT | 18 | U | 1677 |
| 1016902 | 10832 | 10847 | N/A | N/A | GAGTACACACACAGGT | 13 | U | 1678 |
| 1016914 | 11215 | 11230 | N/A | N/A | GGGTGGACGGTTCTCC | 12 | U | 1679 |
| 1016926 | 11749 | 11764 | N/A | N/A | GCCAATTGAGGCTGAG | 33 | U | 1680 |
| 1016958 | 14833 | 14848 | N/A | N/A | GGTTCTAAGGCTCGGT | 20 | U | 1681 |
| 1016967 | 15401 | 15416 | N/A | N/A | TCATCCACCTGACACA | 46 | U | 1682 |
| 1016974 | 15820 | 15835 | N/A | N/A | TCCATCACGGATGGCT | 82 | U | 1683 |
| 1016989 | 16463 | 16478 | N/A | N/A | TCCAGTCCCGCTCCCA | 56 | U | 1684 |
| 1016994 | 16858 | 16873 | N/A | N/A | TGCGGCCGTGCTCACC | 111 | U | 1685 |
| 1016999 | 17255 | 17270 | N/A | N/A | TGTCCTTACTCCAACT | 53 | U | 1686 |
| 1017007 | 17329 | 17344 | N/A | N/A | GGTCCTCAGTAGTAGA | 54 | U | 1687 |
| 1017020 | 17654 | 17669 | N/A | N/A | GGGACCAGAGCTCATC | 88 | U | 1688 |
| 1017028 | 18899 | 18914 | N/A | N/A | TCAATCAAGCGATTCT | 60 | U | 1689 |
| 1017057 | 20851 | 20866 | N/A | N/A | TACTTTTGTTGAGACC | 4 | U | 1690 |
| 1017061 | 20951 | 20966 | N/A | N/A | ACCACTGCCATCTGGT | 89 | U | 1691 |
| 1017069 | 21138 | 21153 | N/A | N/A | TTCAGAATCAAGCTGG | 27 | U | 1692 |
| 1017080 | 21495 | 21510 | N/A | N/A | CCATGTTCTAGGGTCA | 10 | U | 1693 |
| 1017088 | 21904 | 21919 | N/A | N/A | GTCCCTGACGGACCCC | 108 | U | 1694 |
| 1017096 | 22052 | 22067 | N/A | N/A | CTTAATGCCCCACTGT | 31 | U | 1695 |
| 1017102 | 22148 | 22163 | N/A | N/A | CCACTTGGCACCTTTC | 6 | U | 1696 |
| 1017105 | 22335 | 22350 | N/A | N/A | ACCTATGTCCCTCTGC | 16 | U | 1697 |
| 1017109 | 22395 | 22410 | N/A | N/A | TGAGTCTGGTCCTCTA | 84 | U | 1698 |
| 1017118 | 22519 | 22534 | N/A | N/A | TGGTTCCAGGCTAGGA | 59 | U | 1699 |
| 1017129 | 23335 | 23350 | N/A | N/A | GGAATCTGGTGAGGCC | 60 | U | 1700 |
| 1017138 | 23745 | 23760 | N/A | N/A | ACAGCTGTTGTTAGTC | 77 | U | 1701 |
| 1017148 | 25141 | 25156 | N/A | N/A | ACTTTTCTCGAGCTTG | 87 | U | 1702 |
| 1017160 | 25290 | 25305 | N/A | N/A | CTTCTGCACGCCTCCG | 90 | U | 1703 |
| 1017172 | 25516 | 25531 | N/A | N/A | CGAGATCCAGCTCTCC | 115 | U | 1704 |
| 1017184 | 25677 | 25692 | N/A | N/A | CAAGGTAGCCATGTTT | 94 | U | 1705 |
| 1017196 | 26227 | 26242 | N/A | N/A | GTCGATACTTGTCCAC | 77 | U | 1706 |
| 1017208 | 26287 | 26302 | N/A | N/A | AGCAGTAGACTGTCTC | 88 | U | 1707 |
| 1017220 | 26647 | 26662 | N/A | N/A | GGTGCCTGTCCCGTCC | 99 | U | 1708 |
| 569664 | 19498 | 19513 | 1359 | 1374 | TCCCGAATGTCCGACA | 22 | V | 1337 |
| 569984 | 23939 | 23954 | 1997 | 2012 | CGGCGGCACGAGACAG | 13 | V | 1710 |
| 570050 | 24773 | 24788 | 2831 | 2846 | TTTATTCGCGAGGGTC | 13 | V | 1711 |
| 570771 | 19698 | 19713 | N/A | N/A | GGCCTCTTAGGAGTCT | 102 | V | 1713 |
| 570903 | 22284 | 22299 | N/A | N/A | GACAAAAGGCCTTGCT | 33 | V | 1714 |
| 1002425 | 15029 | 15044 | 484 | 499 | GGCATACACCTGGCCC | 81 | V | 1715 |
| 1002449 | 16765 | 16780 | 994 | 1009 | GGCGAATACACCCAGC | 46 | V | 1716 |
| 1002525 | 24235 | 24250 | 2293 | 2308 | TACAAGGACCCTTCGA | 46 | V | 1717 |
| 1002591 | 14090 | 14105 | N/A | N/A | GGTCACATATCCCAGA | 13 | V | 1718 |
| 1002606 | 14367 | 14382 | N/A | N/A | GGTAACGGAGTCTGCA | 23 | V | 1719 |
| 1002636 | N/A | N/A | 1350 | 1365 | TCCGACAGTGTCTCCC | 12 | V | 1720 |
| 1002721 | 13292 | 13307 | N/A | N/A | ACCAAACACCAGTCAC | 28 | V | 1721 |
| 1002738 | 13524 | 13539 | N/A | N/A | TACTAAAGGGAGGCCA | 25 | V | 1722 |
| 1002835 | 15581 | 15596 | N/A | N/A | CCAGAGAATAGGTCCC | 11 | V | 1723 |
| 1002890 | 16468 | 16483 | N/A | N/A | CCAAATCCAGTCCCGC | 43 | V | 1724 |
| 1002907 | 16901 | 16916 | N/A | N/A | GGCGATAGCCTGGGAG | 104 | V | 1725 |
| 1002940 | 17495 | 17510 | N/A | N/A | GCTCAGATAGCTCCCC | 37 | V | 1726 |
| 1002979 | 18900 | 18915 | N/A | N/A | TTCAATCAAGCGATTC | 44 | V | 1727 |
| 1002995 | 19568 | 19583 | N/A | N/A | TGCTTACCTGAGGGCC | 97 | V | 1728 |
| 1003019 | 19736 | 19751 | N/A | N/A | AAGTACATAGATCTGA | 8 | V | 1729 |
| 1003030 | 19814 | 19829 | N/A | N/A | CGTAAAAGTTAATGGT | 7 | V | 1730 |
| 1003036 | 19929 | 19944 | N/A | N/A | GGCCTTATTGTTATAT | 81 | V | 1731 |
| 1003047 | 20883 | 20898 | N/A | N/A | TGTGATAAGCAATGCA | 2 | V | 1732 |
| 1003068 | 21105 | 21120 | N/A | N/A | GTATAGTATGTGTAAT | 9 | V | 1733 |
| 1003089 | 21174 | 21189 | N/A | N/A | GTTCAATCCTGACCCA | 30 | V | 1734 |
| 1003114 | 21334 | 21349 | N/A | N/A | GCAACTTGAGGTCAGC | 55 | V | 1735 |
| 1003142 | 21911 | 21926 | N/A | N/A | CCCAATTGTCCCTGAC | 39 | V | 1736 |
| 1003158 | 22054 | 22069 | N/A | N/A | TACTTAATGCCCCACT | 42 | V | 1737 |
| 1003170 | 22201 | 22216 | N/A | N/A | CAAATCAGGATTCCCA | 9 | V | 1738 |
| 1003202 | 22441 | 22456 | N/A | N/A | AATGATCCAAGCCCCC | 23 | V | 1739 |
| 1003243 | 23019 | 23034 | N/A | N/A | TGTCTATACACGCCCC | 34 | V | 1740 |
| 1003266 | 23355 | 23370 | N/A | N/A | TATCTAGGGAGATCCC | 66 | V | 1741 |
| 1016705 | N/A | N/A | 1537 | 1552 | AGCTGTTTCATCCTGT | 41 | V | 1742 |
| 1016720 | 24515 | 24530 | 2573 | 2588 | CGAGTAAGCAGGCAGA | 47 | V | 1743 |
| 1016726 | 13999 | 14014 | N/A | N/A | ACAATCAGGCCTCTCA | 10 | V | 1744 |
| 1016747 | 8572 | 8587 | N/A | N/A | TGCTGAATGGTGTGCC | 30 | V | 1745 |
| 1016759 | 8866 | 8881 | N/A | N/A | TGATGATGCAGTCCTC | 35 | V | 1746 |
| 1016771 | 9056 | 9071 | N/A | N/A | ACACTAAGATTTCCCT | 22 | V | 1747 |
| 1016783 | 9238 | 9253 | N/A | N/A | AGATTCTGGTTCGAGT | 16 | V | 1748 |
| 1016795 | 9478 | 9493 | N/A | N/A | CTGTTCTAAGAGGTGA | 10 | V | 1749 |
| 1016807 | 9628 | 9643 | N/A | N/A | GCAACTGAGTCCAAGC | 35 | V | 1750 |
| 1016819 | 9720 | 9735 | N/A | N/A | TCAGACTGTGCTCTCA | 16 | V | 1751 |
| 1016831 | 9998 | 10013 | N/A | N/A | GTCCTTGGCGGATCCT | 47 | V | 1752 |
| 1016843 | 10061 | 10076 | N/A | N/A | TGGGAACTTGCATCTT | 17 | V | 1753 |
| 1016855 | 10324 | 10339 | N/A | N/A | AGGGTTATGGCTAGGA | 15 | V | 1754 |
| 1016867 | 10382 | 10397 | N/A | N/A | AGCAGTCCATCCATCA | 17 | V | 1755 |
| 1016879 | 10452 | 10467 | N/A | N/A | GGGCTATTACATCGCC | 102 | V | 1756 |
| 1016891 | 10685 | 10700 | N/A | N/A | ACAATAGCAAGGGCAG | 11 | V | 1757 |
| 1016903 | 10842 | 10857 | N/A | N/A | TAGAACCACAGAGTAC | 23 | V | 1758 |
| 1016915 | 11216 | 11231 | N/A | N/A | AGGGTGGACGGTTCTC | 14 | V | 1759 |
| 1016927 | 11761 | 11776 | N/A | N/A | TGCTGAAACAGGGCCA | 35 | V | 1760 |
| 1016938 | 12465 | 12480 | N/A | N/A | CAGGTCCACACTCTGA | 72 | V | 1761 |
| 1016944 | 12921 | 12936 | N/A | N/A | CAAAGTTGTCCCTCCT | 13 | V | 1762 |
| 1016952 | 13696 | 13711 | N/A | N/A | ACATTGAGCCCTTTTA | 13 | V | 1763 |
| 1016959 | 14834 | 14849 | N/A | N/A | AGGTTCTAAGGCTCGG | 34 | V | 1764 |
| 1016968 | 15431 | 15446 | N/A | N/A | ACCATCCCCGTCTCAG | 46 | V | 1765 |
| 1016975 | 15841 | 15856 | N/A | N/A | GGTAGTCCCCTGAGGC | 88 | V | 1766 |
| 1016984 | 16257 | 16272 | N/A | N/A | TGAACCTCCCTTCTGT | 94 | V | 1767 |
| 1017000 | 17263 | 17278 | N/A | N/A | GTAGGCACTGTCCTTA | 62 | V | 1768 |
| 1017008 | 17346 | 17361 | N/A | N/A | AGTCTAGGTCACTGCT | 15 | V | 1769 |
| 1017021 | 17671 | 17686 | N/A | N/A | GCAACTGGATGAGGGC | 19 | V | 1770 |
| 1017062 | 20980 | 20995 | N/A | N/A | ACATGTGTCAGTACAC | 6 | V | 1771 |
| 1017081 | 21542 | 21557 | N/A | N/A | GGAGCTGCTCTTTCTA | 88 | V | 1772 |
| 1017106 | 22337 | 22352 | N/A | N/A | CAACCTATGTCCCTCT | 16 | V | 1773 |
| 1017119 | 22566 | 22581 | N/A | N/A | AGGCTTAAGGCTGCCT | 79 | V | 1774 |
| 1017139 | 23752 | 23767 | N/A | N/A | ACAGCCTACAGCTGTT | 40 | V | 1775 |
| 1017149 | 25142 | 25157 | N/A | N/A | AACTTTTCTCGAGCTT | 91 | V | 1776 |
| 1017161 | 25292 | 25307 | N/A | N/A | AGCTTCTGCACGCCTC | 109 | V | 1777 |
| 1017173 | 25517 | 25532 | N/A | N/A | GCGAGATCCAGCTCTC | 83 | V | 1778 |
| 1017185 | 25748 | 25763 | N/A | N/A | TCCTCTTCGGTCGCCG | 80 | V | 1779 |
| 1017197 | 26228 | 26243 | N/A | N/A | AGTCGATACTTGTCCA | 99 | V | 1780 |
| 1017209 | 26290 | 26305 | N/A | N/A | TGAAGCAGTAGACTGT | 87 | V | 1781 |
| 1017221 | 26651 | 26666 | N/A | N/A | GGCGGGTGCCTGTCCC | 83 | V | 1782 |
| 569664 | 19498 | 19513 | 1359 | 1374 | TCCCGAATGTCCGACA | 16 | W | 1337 |
| 569888 | 22917 | 22932 | 1765 | 1780 | CTCCATCCGCTCCTGC | 27 | W | 1785 |
| 570732 | 19368 | 19383 | N/A | N/A | TCTAAAGTGGCCCCTC | 8 | W | 1787 |
| 570779 | 20808 | 20823 | N/A | N/A | ATCTATCATGGCTCAC | 9 | W | 1788 |
| 1002426 | 15030 | 15045 | 485 | 500 | TGGCATACACCTGGCC | 76 | W | 1789 |
| 1002451 | 16770 | 16785 | 999 | 1014 | TCATAGGCGAATACAC | 35 | W | 1790 |
| 1002583 | 14000 | 14015 | N/A | N/A | GACAATCAGGCCTCTC | 10 | W | 1791 |
| 1002667 | 12486 | 12501 | N/A | N/A | GAGAAATGTTGCCCCA | 16 | W | 1792 |
| 1002722 | 13310 | 13325 | N/A | N/A | GTTACACACAGGCCAA | 13 | W | 1793 |
| 1002739 | 13525 | 13540 | N/A | N/A | CTACTAAAGGGAGGCC | 24 | W | 1794 |
| 1002761 | 13761 | 13776 | N/A | N/A | GGAGAGTGGGCCAGCA | 19 | W | 1795 |
| 1002803 | 15432 | 15447 | N/A | N/A | CACCATCCCCGTCTCA | 41 | W | 1796 |
| 1002878 | 16261 | 16276 | N/A | N/A | TAAATGAACCTCCCTT | 96 | W | 1797 |
| 1002891 | 16469 | 16484 | N/A | N/A | TCCAAATCCAGTCCCG | 47 | W | 1798 |
| 1002944 | 17557 | 17572 | N/A | N/A | GTGAAGAGAGACGGCC | 40 | W | 1799 |
| 1002969 | 17672 | 17687 | N/A | N/A | TGCAACTGGATGAGGG | 86 | W | 1800 |
| 1003020 | 19738 | 19753 | N/A | N/A | TGAAGTACATAGATCT | 6 | W | 1801 |
| 1003037 | 19935 | 19950 | N/A | N/A | TTAAATGGCCTTATTG | 20 | W | 1802 |
| 1003048 | 20889 | 20904 | N/A | N/A | TTTACTTGTGATAAGC | 1 | W | 1803 |
| 1003069 | 21106 | 21121 | N/A | N/A | GGTATAGTATGTGTAA | 2 | W | 1804 |
| 1003090 | 21182 | 21197 | N/A | N/A | GAGGATGGGTTCAATC | 36 | W | 1805 |
| 1003127 | 21582 | 21597 | N/A | N/A | TTAGGAAAAGCCCTGC | 73 | W | 1806 |
| 1003171 | 22203 | 22218 | N/A | N/A | AACAAATCAGGATTCC | 27 | W | 1807 |
| 1003189 | 22346 | 22361 | N/A | N/A | ACACTAACACAACCTA | 40 | W | 1808 |
| 1003244 | 23020 | 23035 | N/A | N/A | GTGTCTATACACGCCC | 87 | W | 1809 |
| 1003267 | 23357 | 23372 | N/A | N/A | GTTATCTAGGGAGATC | 36 | W | 1810 |
| 1016706 | 22726 | 22741 | 1679 | 1694 | GGTTGTCCGTGCGGAT | 17† | W | 1811 |
| 1016715 | 24316 | 24331 | 2374 | 2389 | TGTGATCCCCCCAGCA | 68 | W | 1812 |
| 1016721 | 24666 | 24681 | 2724 | 2739 | GTCCTGTAGCCTGTCA | 21 | W | 1813 |
| 1016733 | 14093 | 14108 | N/A | N/A | CATGGTCACATATCCC | 12 | W | 1814 |
| 1016739 | 14383 | 14398 | N/A | N/A | AGGATGGTTAGGGTGG | 13 | W | 1815 |
| 1016748 | 8575 | 8590 | N/A | N/A | CAATGCTGAATGGTGT | 14 | W | 1816 |
| 1016760 | 8867 | 8882 | N/A | N/A | GTGATGATGCAGTCCT | 21 | W | 1817 |
| 1016772 | 9057 | 9072 | N/A | N/A | GACACTAAGATTTCCC | 12 | W | 1818 |
| 1016784 | 9240 | 9255 | N/A | N/A | ATAGATTCTGGTTCGA | 14 | W | 1819 |
| 1016796 | 9490 | 9505 | N/A | N/A | ATCCTACAGGCTCTGT | 27 | W | 1820 |
| 1016808 | 9629 | 9644 | N/A | N/A | GGCAACTGAGTCCAAG | 62 | W | 1821 |
| 1016820 | 9725 | 9740 | N/A | N/A | GTCACTCAGACTGTGC | 44 | W | 1822 |
| 1016832 | 10010 | 10025 | N/A | N/A | GCAATAATCAAAGTCC | 12 | W | 1823 |
| 1016844 | 10173 | 10188 | N/A | N/A | GGCTTCAGCCAGTGTC | 74 | W | 1824 |
| 1016856 | 10346 | 10361 | N/A | N/A | TTGATCTGTGAGGTCA | 26 | W | 1825 |
| 1016868 | 10390 | 10405 | N/A | N/A | GGGACTGGAGCAGTCC | 81 | W | 1826 |
| 1016880 | 10492 | 10507 | N/A | N/A | TGTACTTGGCAGTGGG | 13 | W | 1827 |
| 1016892 | 10686 | 10701 | N/A | N/A | GACAATAGCAAGGGCA | 10 | W | 1828 |
| 1016904 | 10957 | 10972 | N/A | N/A | GTGACTCGCAGGTCCG | 20 | W | 1829 |
| 1016916 | 11257 | 11272 | N/A | N/A | TGCGGCTCCGAGAGCC | 81 | W | 1830 |
| 1016928 | 11774 | 11789 | N/A | N/A | AGAACCTGCCCATTGC | 12 | W | 1831 |
| 1016945 | 12967 | 12982 | N/A | N/A | GGTGGGTGCAGAACCT | 69 | W | 1832 |
| 1016960 | 15280 | 15295 | N/A | N/A | TCCCTCTTCCTAGTCA | 57 | W | 1833 |
| 1016970 | 15638 | 15653 | N/A | N/A | GCAGATTCACTCCCCC | 7 | W | 1834 |
| 1016976 | 15844 | 15859 | N/A | N/A | GTTGGTAGTCCCCTGA | 79 | W | 1835 |
| 1016995 | 16926 | 16941 | N/A | N/A | GGTGCTCCTGCTCAGA | 109 | W | 1836 |
| 1017001 | 17266 | 17281 | N/A | N/A | AAGGTAGGCACTGTCC | 12 | W | 1837 |
| 1017009 | 17349 | 17364 | N/A | N/A | GTAAGTCTAGGTCACT | 5 | W | 1838 |
| 1017029 | 19089 | 19104 | N/A | N/A | AGCTGTTGTAGTCCCA | 37 | W | 1839 |
| 1017035 | 19570 | 19585 | N/A | N/A | AGTGCTTACCTGAGGG | 105 | W | 1840 |
| 1017044 | 19829 | 19844 | N/A | N/A | TCTGTGTACTACAGAC | 41 | W | 1841 |
| 1017063 | 20981 | 20996 | N/A | N/A | AACATGTGTCAGTACA | 1 | W | 1842 |
| 1017072 | 21380 | 21395 | N/A | N/A | ACCTCCACAGATGTGG | 77 | W | 1843 |
| 1017089 | 21916 | 21931 | N/A | N/A | TCTCTCCCAATTGTCC | 55 | W | 1844 |
| 1017097 | 22056 | 22071 | N/A | N/A | CTTACTTAATGCCCCA | 13 | W | 1845 |
| 1017110 | 22443 | 22458 | N/A | N/A | GCAATGATCCAAGCCC | 60 | W | 1846 |
| 1017120 | 22743 | 22758 | N/A | N/A | CGACCTGGCGAAGTTC | 68† | W | 1847 |
| 1017140 | 23792 | 23807 | N/A | N/A | GGTGGGCCCGCACTCT | 91 | W | 1848 |
| 1017150 | 25144 | 25159 | N/A | N/A | GCAACTTTTCTCGAGC | 78 | W | 1849 |
| 1017162 | 25302 | 25317 | N/A | N/A | CCCGAGACTGAGCTTC | 94 | W | 1850 |
| 1017174 | 25518 | 25533 | N/A | N/A | GGCGAGATCCAGCTCT | 87 | W | 1851 |
| 1017186 | 25771 | 25786 | N/A | N/A | AGAGCTGGCGCGCTTC | 94 | W | 1852 |
| 1017198 | 26229 | 26244 | N/A | N/A | CAGTCGATACTTGTCC | 103 | W | 1853 |
| 1017210 | 26329 | 26344 | N/A | N/A | CGCGGTAGCAGGCCTT | 76 | W | 1854 |
| 1017222 | 26735 | 26750 | N/A | N/A | GTGATTCCCCAACACC | 89 | W | 1855 |
| 569495 | 16314 | 16329 | 796 | 811 | CAGGATGTTGTCGGGT | 10 | X | 1858 |
| 569664 | 19498 | 19513 | 1359 | 1374 | TCCCGAATGTCCGACA | 15 | X | 1337 |
| 570049 | 24772 | 24787 | 2830 | 2845 | TTATTCGCGAGGGTCG | 20 | X | 1859 |
| 570051 | 24774 | 24789 | 2832 | 2847 | TTTTATTCGCGAGGGT | 13 | X | 1860 |
| 570769 | 19694 | 19709 | N/A | N/A | TCTTAGGAGTCTTTGG | 5 | X | 1861 |
| 1002453 | 16772 | 16787 | 1001 | 1016 | TTTCATAGGCGAATAC | 51 | × | 1862 |
| 1002584 | 14001 | 14016 | N/A | N/A | TGACAATCAGGCCTCT | 17 | X | 1863 |
| 1002609 | 14386 | 14401 | N/A | N/A | TGCAGGATGGTTAGGG | 34 | X | 1864 |
| 1002668 | 12487 | 12502 | N/A | N/A | AGAGAAATGTTGCCCC | 10 | X | 1865 |
| 1002690 | 13000 | 13015 | N/A | N/A | CATAGGAACCGAGACT | 33 | X | 1866 |
| 1002723 | 13311 | 13326 | N/A | N/A | TGTTACACACAGGCCA | 16 | X | 1867 |
| 1002740 | 13526 | 13541 | N/A | N/A | TCTACTAAAGGGAGGC | 21 | X | 1868 |
| 1002804 | 15434 | 15449 | N/A | N/A | GACACCATCCCCGTCT | 91 | X | 1869 |
| 1002879 | 16262 | 16277 | N/A | N/A | ATAAATGAACCTCCCT | 11 | X | 1870 |
| 1002893 | 16506 | 16521 | N/A | N/A | GCACACTTAAGCCTGG | 18 | X | 1871 |
| 1002912 | 17192 | 17207 | N/A | N/A | GGTACCTACCCCGCCC | 86 | X | 1872 |
| 1002934 | 17350 | 17365 | N/A | N/A | TGTAAGTCTAGGTCAC | 3 | X | 1873 |
| 1002947 | 17565 | 17580 | N/A | N/A | GTTACACGGTGAAGAG | 4 | X | 1874 |
| 1002971 | 17678 | 17693 | N/A | N/A | CTAGACTGCAACTGGA | 25 | X | 1875 |
| 1003002 | 19647 | 19662 | N/A | N/A | TGCAACTCCATTGGCT | 42 | X | 1876 |
| 1003038 | 19951 | 19966 | N/A | N/A | GCCTAAATTAATACTT | 77 | X | 1877 |
| 1003049 | 20925 | 20940 | N/A | N/A | GATATCAACTTCCTTT | 11 | X | 1878 |
| 1003061 | 20982 | 20997 | N/A | N/A | AAACATGTGTCAGTAC | 3 | X | 1879 |
| 1003070 | 21107 | 21122 | N/A | N/A | AGGTATAGTATGTGTA | 1 | X | 1880 |
| 1003094 | 21189 | 21204 | N/A | N/A | TCTAATAGAGGATGGG | 35 | X | 1881 |
| 1003129 | 21602 | 21617 | N/A | N/A | GCCAATAGCCCCTCCT | 16 | × | 1882 |
| 1003159 | 22058 | 22073 | N/A | N/A | CCCTTACTTAATGCCC | 29 | X | 1883 |
| 1003172 | 22204 | 22219 | N/A | N/A | GAACAAATCAGGATTC | 76 | X | 1884 |
| 1003190 | 22347 | 22362 | N/A | N/A | AACACTAACACAACCT | 46 | X | 1885 |
| 1003217 | 22751 | 22766 | N/A | N/A | CCCGATCCCGACCTGG | 93† | X | 1886 |
| 1016699 | 15032 | 15047 | 487 | 502 | CATGGCATACACCTGG | 33 | X | 1887 |
| 1016707 | 22733 | 22748 | 1686 | 1701 | AAGTTCTGGTTGTCCG | 17† | X | 1888 |
| 1016716 | 24323 | 24338 | 2381 | 2396 | AATGGTCTGTGATCCC | 34 | X | 1889 |
| 1016722 | 24667 | 24682 | 2725 | 2740 | GGTCCTGTAGCCTGTC | 33 | X | 1890 |
| 1016734 | 14101 | 14116 | N/A | N/A | AAAGGTAGCATGGTCA | 11 | X | 1891 |
| 1016742 | 14915 | 14930 | N/A | N/A | CGCTTCTGCACCCAGC | 95 | X | 1892 |
| 1016749 | 8577 | 8592 | N/A | N/A | GCCAATGCTGAATGGT | 65 | X | 1893 |
| 1016761 | 8868 | 8883 | N/A | N/A | AGTGATGATGCAGTCC | 15 | X | 1894 |
| 1016773 | 9058 | 9073 | N/A | N/A | AGACACTAAGATTTCC | 6 | X | 1895 |
| 1016785 | 9241 | 9256 | N/A | N/A | AATAGATTCTGGTTCG | 8 | X | 1896 |
| 1016797 | 9514 | 9529 | N/A | N/A | GGCAAGCACATCCACC | 22 | X | 1897 |
| 1016809 | 9653 | 9668 | N/A | N/A | CAAGCCACGGCCTCCA | 34 | X | 1898 |
| 1016821 | 9767 | 9782 | N/A | N/A | GACTCAACCAGACTCC | 53 | X | 1899 |
| 1016833 | 10011 | 10026 | N/A | N/A | CGCAATAATCAAAGTC | 10 | X | 1900 |
| 1016845 | 10271 | 10286 | N/A | N/A | GGCTTCACACCACTGT | 15 | X | 1901 |
| 1016857 | 10347 | 10362 | N/A | N/A | GTTGATCTGTGAGGTC | 11 | X | 1902 |
| 1016869 | 10407 | 10422 | N/A | N/A | AATTTTGTGCAGGTGG | 11 | X | 1903 |
| 1016881 | 10493 | 10508 | N/A | N/A | TTGTACTTGGCAGTGG | 12 | X | 1904 |
| 1016893 | 10714 | 10729 | N/A | N/A | CCATAATTTAACACTC | 7 | X | 1905 |
| 1016905 | 10959 | 10974 | N/A | N/A | GTGTGACTCGCAGGTC | 11 | X | 1906 |
| 1016917 | 11276 | 11291 | N/A | N/A | CGCGGGAAGACACACT | 40 | X | 1907 |
| 1016929 | 11793 | 11808 | N/A | N/A | GGTGTGATGAATTTCA | 11 | X | 1908 |
| 1016953 | 13916 | 13931 | N/A | N/A | GGCTTGTGGCTCAGGG | 23 | X | 1909 |
| 1016961 | 15288 | 15303 | N/A | N/A | GGCTCTTGTCCCTCTT | 76 | X | 1910 |
| 1016971 | 15646 | 15661 | N/A | N/A | GTCACTGGGCAGATTC | 10 | X | 1911 |
| 1016977 | 15848 | 15863 | N/A | N/A | GGTGGTTGGTAGTCCC | 60 | X | 1912 |
| 1017002 | 17283 | 17298 | N/A | N/A | GTGATTCAGGACCCCA | 2 | X | 1913 |
| 1017030 | 19091 | 19106 | N/A | N/A | TCAGCTGTTGTAGTCC | 49 | X | 1914 |
| 1017039 | 19794 | 19809 | N/A | N/A | AGATTCTGGGAAGCCC | 8 | X | 1915 |
| 1017045 | 19832 | 19847 | N/A | N/A | GGCTCTGTGTACTACA | 6 | X | 1916 |
| 1017073 | 21398 | 21413 | N/A | N/A | GACTGCTTGGCTCTGG | 6 | X | 1917 |
| 1017090 | 21949 | 21964 | N/A | N/A | ACAGTGCACGCCACCC | 40 | X | 1918 |
| 1017111 | 22452 | 22467 | N/A | N/A | ATAGCTCCTGCAATGA | 52 | X | 1919 |
| 1017126 | 23021 | 23036 | N/A | N/A | GGTGTCTATACACGCC | 77 | X | 1920 |
| 1017130 | 23656 | 23671 | N/A | N/A | GAAGATCCGCCCTCCT | 74 | X | 1921 |
| 1017141 | 23795 | 23810 | N/A | N/A | ATAGGTGGGCCCGCAC | 63 | X | 1922 |
| 1017151 | 25145 | 25160 | N/A | N/A | AGCAACTTTTCTCGAG | 85 | X | 1923 |
| 1017163 | 25327 | 25342 | N/A | N/A | AGGACTAAGGGCGCGA | 84 | X | 1924 |
| 1017175 | 25523 | 25538 | N/A | N/A | GGGAAGGCGAGATCCA | 70 | X | 1925 |
| 1017187 | 25790 | 25805 | N/A | N/A | GCCGCCTGCAAAGTCT | 125 | X | 1926 |
| 1017199 | 26239 | 26254 | N/A | N/A | ACTTCTTGCGCAGTCG | 76 | X | 1927 |
| 1017211 | 26335 | 26350 | N/A | N/A | GGTTGCCGCGGTAGCA | 82 | X | 1928 |
| 1017223 | 26742 | 26757 | N/A | N/A | CCGCAGTGTGATTCCC | 109 | X | 1929 |
| 569664 | 19498 | 19513 | 1359 | 1374 | TCCCGAATGTCCGACA | 20 | Y | 1337 |
| 569983 | 23938 | 23953 | 1996 | 2011 | GGCGGCACGAGACAGA | 12 | Y | 1931 |
| 570762 | 19655 | 19670 | N/A | N/A | ACTGATCCTGCAACTC | 7 | Y | 1933 |
| 570921 | 22336 | 22351 | N/A | N/A | AACCTATGTCCCTCTG | 20 | Y | 1936 |
| 1002427 | 15035 | 15050 | 490 | 505 | CTTCATGGCATACACC | 28 | Y | 1937 |
| 1002456 | 16784 | 16799 | 1013 | 1028 | GCCCATAGAACATTTC | 56 | Y | 1938 |
| 1002536 | 24409 | 24424 | 2467 | 2482 | TGGAACACGGACGGCC | 82 | Y | 1939 |
| 1002574 | 24796 | 24811 | 2854 | 2869 | AGCTTTGGGCAGATGG | 61 | Y | 1940 |
| 1002593 | 14103 | 14118 | N/A | N/A | ACAAAGGTAGCATGGT | 16 | Y | 1941 |
| 1002643 | 14948 | 14963 | N/A | N/A | AAACAAAAGGGCTCGC | 75 | Y | 1942 |
| 1002693 | 13003 | 13018 | N/A | N/A | GCTCATAGGAACCGAG | 61 | Y | 1943 |
| 1002745 | 13553 | 13568 | N/A | N/A | GTTTACCCTGCCAACC | 52 | Y | 1944 |
| 1002792 | 15298 | 15313 | N/A | N/A | TGACAGCACGGGCTCT | 52 | Y | 1945 |
| 1002818 | 15477 | 15492 | N/A | N/A | TTTATAAGAGTCCCCC | 20 | Y | 1946 |
| 1002880 | 16263 | 16278 | N/A | N/A | GATAAATGAACCTCCC | 72 | Y | 1947 |
| 1002927 | 17284 | 17299 | N/A | N/A | AGTGATTCAGGACCCC | 6 | Y | 1948 |
| 1002948 | 17566 | 17581 | N/A | N/A | TGTTACACGGTGAAGA | 16 | Y | 1949 |
| 1002985 | 19369 | 19384 | N/A | N/A | ATCTAAAGTGGCCCCT | 16 | Y | 1950 |
| 1003050 | 20926 | 20941 | N/A | N/A | AGATATCAACTTCCTT | 4 | Y | 1951 |
| 1003071 | 21108 | 21123 | N/A | N/A | AAGGTATAGTATGTGT | 3 | Y | 1952 |
| 1003148 | 21955 | 21970 | N/A | N/A | GGCTCTACAGTGCACG | 70 | Y | 1953 |
| 1003174 | 22219 | 22234 | N/A | N/A | CAAACTACCTTTCAGG | 100 | Y | 1954 |
| 1003192 | 22353 | 22368 | N/A | N/A | TGCTCAAACACTAACA | 78 | Y | 1955 |
| 1003205 | 22462 | 22477 | N/A | N/A | TGGAATCCCCATAGCT | 144 | Y | 1956 |
| 1003247 | 23164 | 23179 | N/A | N/A | TTACATGGGAAGGTGG | 57 | Y | 1957 |
| 1003302 | 23798 | 23813 | N/A | N/A | CCCATAGGTGGGCCCG | 89 | Y | 1958 |
| 1016708 | 22734 | 22749 | 1687 | 1702 | GAAGTTCTGGTTGTCC | 5† | Y | 1959 |
| 1016727 | 14002 | 14017 | N/A | N/A | ATGACAATCAGGCCTC | 17 | Y | 1960 |
| 1016740 | 14389 | 14404 | N/A | N/A | GTGTGCAGGATGGTTA | 17 | Y | 1961 |
| 1016750 | 8606 | 8621 | N/A | N/A | CGCTCCTGCAGTGTGA | 40 | Y | 1962 |
| 1016762 | 8892 | 8907 | N/A | N/A | GCAGATGAGGCCCTCC | 32 | Y | 1963 |
| 1016774 | 9065 | 9080 | N/A | N/A | TGTACTGAGACACTAA | 35 | Y | 1964 |
| 1016786 | 9276 | 9291 | N/A | N/A | AAGTTTCACGATTTAA | 13 | Y | 1965 |
| 1016798 | 9550 | 9565 | N/A | N/A | TACTATGACCTTCCCA | 15 | Y | 1966 |
| 1016810 | 9667 | 9682 | N/A | N/A | AGGATCTGAGGAACCA | 33 | Y | 1967 |
| 1016822 | 9798 | 9813 | N/A | N/A | TGAACTACGGAGACAG | 65 | Y | 1968 |
| 1016834 | 10019 | 10034 | N/A | N/A | CACTTTCACGCAATAA | 25 | Y | 1969 |
| 1016846 | 10274 | 10289 | N/A | N/A | CATGGCTTCACACCAC | 39 | Y | 1970 |
| 1016858 | 10364 | 10379 | N/A | N/A | GTTAGTCTTGTTAATA | 13 | Y | 1971 |
| 1016870 | 10408 | 10423 | N/A | N/A | AAATTTTGTGCAGGTG | 10 | Y | 1972 |
| 1016882 | 10497 | 10512 | N/A | N/A | GTCATTGTACTTGGCA | 8 | Y | 1973 |
| 1016894 | 10748 | 10763 | N/A | N/A | GGTCCTGCGGGACAGG | 73 | Y | 1974 |
| 1016906 | 10962 | 10977 | N/A | N/A | GTTGTGTGACTCGCAG | 14 | Y | 1975 |
| 1016918 | 11305 | 11320 | N/A | N/A | ACAGAAACATTTCGGG | 14 | Y | 1976 |
| 1016930 | 11853 | 11868 | N/A | N/A | GAGAATCTCAGCTGTC | 16 | Y | 1977 |
| 1016939 | 12488 | 12503 | N/A | N/A | CAGAGAAATGTTGCCC | 12 | Y | 1978 |
| 1016947 | 13312 | 13327 | N/A | N/A | TTGTTACACACAGGCC | 30 | Y | 1979 |
| 1016954 | 13919 | 13934 | N/A | N/A | GGAGGCTTGTGGCTCA | 40 | Y | 1980 |
| 1016972 | 15660 | 15675 | N/A | N/A | AACTTTCCTGGGATGT | 23 | Y | 1981 |
| 1016978 | 15849 | 15864 | N/A | N/A | GGGTGGTTGGTAGTCC | 70 | Y | 1982 |
| 1016990 | 16525 | 16540 | N/A | N/A | AATACTCCGCCACACA | 25 | Y | 1983 |
| 1016996 | 17196 | 17211 | N/A | N/A | CACAGGTACCTACCCC | 69 | Y | 1984 |
| 1017010 | 17353 | 17368 | N/A | N/A | GACTGTAAGTCTAGGT | 48 | Y | 1985 |
| 1017022 | 17684 | 17699 | N/A | N/A | AATTCTCTAGACTGCA | 26 | Y | 1986 |
| 1017036 | 19671 | 19686 | N/A | N/A | ACAGTAAGGTTCCAAG | 2 | Y | 1987 |
| 1017040 | 19795 | 19810 | N/A | N/A | AAGATTCTGGGAAGCC | 4 | Y | 1988 |
| 1017046 | 19851 | 19866 | N/A | N/A | CCAAGTTCTGAAGTCC | 1 | Y | 1989 |
| 1017052 | 20460 | 20475 | N/A | N/A | GGGTTCTGATTCTCCT | 36 | Y | 1990 |
| 1017064 | 21003 | 21018 | N/A | N/A | AACACCTGTTCTCCAC | 30 | Y | 1991 |
| 1017070 | 21193 | 21208 | N/A | N/A | GGGTTCTAATAGAGGA | 12 | Y | 1992 |
| 1017074 | 21461 | 21476 | N/A | N/A | CATGTGACCGCTGCAG | 84 | Y | 1993 |
| 1017082 | 21654 | 21669 | N/A | N/A | CCTGATTTGAGGAAGG | 65 | Y | 1994 |
| 1017098 | 22059 | 22074 | N/A | N/A | ACCCTTACTTAATGCC | 84 | Y | 1995 |
| 1017121 | 22787 | 22802 | N/A | N/A | GTTGCCACCGGCCCGC | 137† | Y | 1996 |
| 1017131 | 23671 | 23686 | N/A | N/A | GTTGATTGGCTGCCCG | 23 | Y | 1997 |
| 1017152 | 25148 | 25163 | N/A | N/A | TGCAGCAACTTTTCTC | 111 | Y | 1998 |
| 1017164 | 25344 | 25359 | N/A | N/A | GTAACGGGCCGTCCAG | 139 | Y | 1999 |
| 1017176 | 25559 | 25574 | N/A | N/A | TCGATCTTCTTTCTGG | 128 | Y | 2000 |
| 1017188 | 26009 | 26024 | N/A | N/A | GGCAGTGCGCCCAGGA | 90 | Y | 2001 |
| 1017200 | 26242 | 26257 | N/A | N/A | GGAACTTCTTGCGCAG | 105 | Y | 2002 |
| 1017212 | 26414 | 26429 | N/A | N/A | TTGAACCAGTTGCTGA | 84 | Y | 2003 |
| 1017224 | 26761 | 26776 | N/A | N/A | TCAGTCCCTCTAGTGC | 122 | Y | 2004 |
| 569396 | N/A | N/A | 535 | 550 | GCACGACACCTCGCCC | 27 | Z | 2007 |
| 569398 | N/A | N/A | 537 | 552 | AAGCACGACACCTCGC | 40 | Z | 2008 |
| 569539 | 16778 | 16793 | 1007 | 1022 | AGAACATTTCATAGGC | 10 | Z | 2009 |
| 569664 | 19498 | 19513 | 1359 | 1374 | TCCCGAATGTCCGACA | 11 | Z | 1337 |
| 570218 | 13986 | 14001 | N/A | N/A | TCAGAAGTCAAGGTCC | 8 | Z | 2010 |
| 1002428 | 15037 | 15052 | 492 | 507 | ATCTTCATGGCATACA | 63 | Z | 2011 |
| 1002458 | 16834 | 16849 | 1063 | 1078 | GACGATCTTGCCATAG | 32 | Z | 2012 |
| 1002488 | N/A | N/A | 1696 | 1711 | TTGACTGGCGAAGTTC | 13† | Z | 2013 |
| 1002539 | 24414 | 24429 | 2472 | 2487 | GAGGATGGAACACGGA | 15 | Z | 2014 |
| 1002576 | 13956 | 13971 | N/A | N/A | TTAAACTGGGCAGCCT | 9 | Z | 2015 |
| 1002585 | 14003 | 14018 | N/A | N/A | GATGACAATCAGGCCT | 34 | Z | 2016 |
| 1002619 | 14456 | 14471 | N/A | N/A | TCCCATAGAGGTGAGA | 32 | Z | 2017 |
| 1002644 | 14949 | 14964 | N/A | N/A | AAAACAAAAGGGCTCG | 76 | Z | 2018 |
| 1002669 | 12500 | 12515 | N/A | N/A | GGTGGCATAGGACAGA | 11 | Z | 2019 |
| 1002701 | 13057 | 13072 | N/A | N/A | AGAACTAAAGGACGCA | 19 | Z | 2020 |
| 1002819 | 15478 | 15493 | N/A | N/A | CTTTATAAGAGTCCCC | 9 | Z | 2021 |
| 1002842 | 15722 | 15737 | N/A | N/A | GCCAAATCAGAGACCA | 18 | Z | 2022 |
| 1002881 | 16264 | 16279 | N/A | N/A | GGATAAATGAACCTCC | 45 | Z | 2023 |
| 1002897 | 16527 | 16542 | N/A | N/A | CTAATACTCCGCCACA | 12 | Z | 2024 |
| 1002973 | 17688 | 17703 | N/A | N/A | CTCTAATTCTCTAGAC | 84 | Z | 2025 |
| 1003007 | 19673 | 19688 | N/A | N/A | AAACAGTAAGGTTCCA | 2 | Z | 2026 |
| 1003025 | 19796 | 19811 | N/A | N/A | CAAGATTCTGGGAAGC | 5 | Z | 2027 |
| 1003051 | 20927 | 20942 | N/A | N/A | GAGATATCAACTTCCT | 2 | Z | 2028 |
| 1003064 | 21060 | 21075 | N/A | N/A | ACCAACTGTTCTCTTA | 3 | Z | 2029 |
| 1003072 | 21110 | 21125 | N/A | N/A | ATAAGGTATAGTATGT | 6 | Z | 2030 |
| 1003097 | 21205 | 21220 | N/A | N/A | GGACATGCGCCTGGGT | 8 | Z | 2031 |
| 1003175 | 22220 | 22235 | N/A | N/A | CCAAACTACCTTTCAG | 21 | Z | 2032 |
| 1003196 | 22378 | 22393 | N/A | N/A | ATCTACACAGGGACCA | 55 | Z | 2033 |
| 1003248 | 23166 | 23181 | N/A | N/A | TCTTACATGGGAAGGT | 61 | Z | 2034 |
| 1016735 | 14174 | 14189 | N/A | N/A | TGCAGGTGGTTCTTGA | 35 | Z | 2035 |
| 1016751 | 8777 | 8792 | N/A | N/A | TGGATGCGCGGGCACA | 14 | Z | 2036 |
| 1016763 | 8893 | 8908 | N/A | N/A | TGCAGATGAGGCCCTC | 100 | Z | 2037 |
| 1016775 | 9068 | 9083 | N/A | N/A | TCTTGTACTGAGACAC | 12 | Z | 2038 |
| 1016787 | 9281 | 9296 | N/A | N/A | CAAAAAAGTTTCACGA | 54 | Z | 2039 |
| 1016799 | 9551 | 9566 | N/A | N/A | CTACTATGACCTTCCC | 17 | Z | 2040 |
| 1016811 | 9682 | 9697 | N/A | N/A | ACGATTCCAAAACTGA | 10 | Z | 2041 |
| 1016823 | 9799 | 9814 | N/A | N/A | GTGAACTACGGAGACA | 81 | Z | 2042 |
| 1016835 | 10028 | 10043 | N/A | N/A | GGCAGTCAGCACTTTC | 17 | Z | 2043 |
| 1016847 | 10276 | 10291 | N/A | N/A | TCCATGGCTTCACACC | 13 | Z | 2044 |
| 1016859 | 10367 | 10382 | N/A | N/A | ATGGTTAGTCTTGTTA | 9 | Z | 2045 |
| 1016871 | 10409 | 10424 | N/A | N/A | CAAATTTTGTGCAGGT | 8 | Z | 2046 |
| 1016883 | 10498 | 10513 | N/A | N/A | GGTCATTGTACTTGGC | 9 | Z | 2047 |
| 1016895 | 10759 | 10774 | N/A | N/A | TATAAATAAGAGGTCC | 9 | Z | 2048 |
| 1016907 | 10969 | 10984 | N/A | N/A | GTCACCAGTTGTGTGA | 206 | Z | 2049 |
| 1016919 | 11306 | 11321 | N/A | N/A | AACAGAAACATTTCGG | 10 | Z | 2050 |
| 1016931 | 11854 | 11869 | N/A | N/A | GGAGAATCTCAGCTGT | 14 | Z | 2051 |
| 1016948 | 13317 | 13332 | N/A | N/A | ACAGTTTGTTACACAC | 6 | Z | 2052 |
| 1016950 | 13598 | 13613 | N/A | N/A | AGTGCTCCTCCCGGGA | 67 | Z | 2053 |
| 1016955 | 14763 | 14778 | N/A | N/A | TCAAGTCAGGCTCCCG | 47 | Z | 2054 |
| 1016962 | 15303 | 15318 | N/A | N/A | TCCAGTGACAGCACGG | 83 | Z | 2055 |
| 1016979 | 15854 | 15869 | N/A | N/A | GTCATGGGTGGTTGGT | 125 | Z | 2056 |
| 1016997 | 17221 | 17236 | N/A | N/A | GAGGTTCCCGCAGCCG | 88 | Z | 2057 |
| 1017003 | 17290 | 17305 | N/A | N/A | GGAATGAGTGATTCAG | 3 | Z | 2058 |
| 1017011 | 17355 | 17370 | N/A | N/A | TGGACTGTAAGTCTAG | 64 | Z | 2059 |
| 1017016 | 17569 | 17584 | N/A | N/A | GCTTGTTACACGGTGA | 2 | Z | 2060 |
| 1017031 | 19371 | 19386 | N/A | N/A | TTATCTAAAGTGGCCC | 55 | Z | 2061 |
| 1017047 | 19880 | 19895 | N/A | N/A | TGATTGTAAAAGTCTA | 77 | Z | 2062 |
| 1017053 | 20570 | 20585 | N/A | N/A | GCCTGTAAATTAGTAC | 56 | Z | 2063 |
| 1017075 | 21462 | 21477 | N/A | N/A | ACATGTGACCGCTGCA | 53 | Z | 2064 |
| 1017083 | 21695 | 21710 | N/A | N/A | AACTTCTGGCCTGTGG | 46 | Z | 2065 |
| 1017091 | 21956 | 21971 | N/A | N/A | GGGCTCTACAGTGCAC | 145 | Z | 2066 |
| 1017099 | 22081 | 22096 | N/A | N/A | TCAGATCCCCAGCAAC | 15 | Z | 2067 |
| 1017112 | 22468 | 22483 | N/A | N/A | CATTTCTGGAATCCCC | 36 | Z | 2068 |
| 1017122 | 22825 | 22840 | N/A | N/A | GTGAGTCCGTCCGGGC | 122† | Z | 2069 |
| 1017132 | 23672 | 23687 | N/A | N/A | TGTTGATTGGCTGCCC | 41 | Z | 2070 |
| 1017142 | 23824 | 23839 | N/A | N/A | GGCTCCTGGGACTCGC | 59 | Z | 2071 |
| 1017153 | 25159 | 25174 | N/A | N/A | GCTAGAAAGTTTGCAG | 80 | Z | 2072 |
| 1017165 | 25348 | 25363 | N/A | N/A | GAAGGTAACGGGCCGT | 76 | Z | 2073 |
| 1017177 | 25566 | 25581 | N/A | N/A | GCTCTTCTCGATCTTC | 58 | Z | 2074 |
| 1017189 | 26048 | 26063 | N/A | N/A | CGCAACACCGGGTCGC | 154 | Z | 2075 |
| 1017201 | 26246 | 26261 | N/A | N/A | AGCGGGAACTTCTTGC | 183 | Z | 2076 |
| 1017213 | 26437 | 26452 | N/A | N/A | TCCGGTCGCGCTGTCG | 94 | Z | 2077 |
| 1017225 | 26842 | 26857 | N/A | N/A | AGAGTAACGGTCAGTG | 78 | Z | 2078 |
| 569664 | 19498 | 19513 | 1359 | 1374 | TCCCGAATGTCCGACA | 15 | AA | 1337 |
| 570217 | 13985 | 14000 | N/A | N/A | CAGAAGTCAAGGTCCT | 13 | AA | 2080 |
| 570266 | 14240 | 14255 | N/A | N/A | TCTCATGTAGAATGTC | 12 | AA | 2081 |
| 570428 | 13334 | 13349 | N/A | N/A | GGAAACAAGTGTCACA | 16 | AA | 2083 |
| 570445 | 13558 | 13573 | N/A | N/A | TCTCAGTTTACCCTGC | 15 | AA | 2084 |
| 1002429 | 15224 | 15239 | 600 | 615 | GCGAAGTGCAGCTGCG | 96 | AA | 2086 |
| 1002543 | 24441 | 24456 | 2499 | 2514 | CGAACCAACGATAGGT | 31 | AA | 2087 |
| 1002577 | 13957 | 13972 | N/A | N/A | GTTAAACTGGGCAGCC | 16 | AA | 2088 |
| 1002597 | 14179 | 14194 | N/A | N/A | TCAGATGCAGGTGGTT | 18 | AA | 2089 |
| 1002620 | 14468 | 14483 | N/A | N/A | CCAAAAATGCCCTCCC | 32 | AA | 2090 |
| 1002654 | 14980 | 14995 | N/A | N/A | CGAGATAGTGAGACAG | 137 | AA | 2091 |
| 1002725 | 13321 | 13336 | N/A | N/A | ACACACAGTTTGTTAC | 15 | AA | 2092 |
| 1002749 | 13607 | 13622 | N/A | N/A | CACAAAAGGAGTGCTC | 50 | AA | 2093 |
| 1002768 | 14764 | 14779 | N/A | N/A | GTCAAGTCAGGCTCCC | 41 | AA | 2094 |
| 1002820 | 15479 | 15494 | N/A | N/A | TCTTTATAAGAGTCCC | 16 | AA | 2095 |
| 1002847 | 15740 | 15755 | N/A | N/A | ACCATAGAGATCTGCC | 11 | AA | 2096 |
| 1002860 | 15855 | 15870 | N/A | N/A | CGTCATGGGTGGTTGG | 73 | AA | 2097 |
| 1002882 | 16265 | 16280 | N/A | N/A | GGGATAAATGAACCTC | 109 | AA | 2098 |
| 1002898 | 16528 | 16543 | N/A | N/A | TCTAATACTCCGCCAC | 20 | AA | 2099 |
| 1002917 | 17241 | 17256 | N/A | N/A | CTTTATGGAGGGAGCA | 23 | AA | 2100 |
| 1002929 | 17291 | 17306 | N/A | N/A | GGGAATGAGTGATTCA | 4 | AA | 2101 |
| 1002935 | 17356 | 17371 | N/A | N/A | CTGGACTGTAAGTCTA | 102 | AA | 2102 |
| 1002953 | 17579 | 17594 | N/A | N/A | TGCCATGACAGCTTGT | 15 | AA | 2103 |
| 1002986 | 19373 | 19388 | N/A | N/A | GCTTATCTAAAGTGGC | 84 | AA | 2104 |
| 1003009 | 19675 | 19690 | N/A | N/A | CAAAACAGTAAGGTTC | 16 | AA | 2105 |
| 1003026 | 19800 | 19815 | N/A | N/A | GTTACAAGATTCTGGG | 3 | AA | 2106 |
| 1003041 | 20706 | 20721 | N/A | N/A | CACGATTTTTTCAATT | 16 | AA | 2107 |
| 1003052 | 20928 | 20943 | N/A | N/A | CGAGATATCAACTTCC | 15 | AA | 2108 |
| 1003065 | 21072 | 21087 | N/A | N/A | GCTGACTAGAAAACCA | 73 | AA | 2109 |
| 1003075 | 21113 | 21128 | N/A | N/A | ATGATAAGGTATAGTA | 3 | AA | 2110 |
| 1003098 | 21206 | 21221 | N/A | N/A | TGGACATGCGCCTGGG | 26 | AA | 2111 |
| 1003123 | 21466 | 21481 | N/A | N/A | CTTGACATGTGACCGC | 3 | AA | 2112 |
| 1003150 | 21963 | 21978 | N/A | N/A | CCCTAGAGGGCTCTAC | 100 | AA | 2113 |
| 1003177 | 22230 | 22245 | N/A | N/A | AATGATTCAGCCAAAC | 16 | AA | 2114 |
| 1003197 | 22380 | 22395 | N/A | N/A | AAATCTACACAGGGAC | 52 | AA | 2115 |
| 1003305 | 23842 | 23857 | N/A | N/A | CGGCATGGGCCTCTGA | 117 | AA | 2116 |
| 1016703 | 16977 | 16992 | 1130 | 1145 | TGAAGTCTCGAGCCTC | 43 | AA | 2117 |
| 1016709 | N/A | N/A | 1697 | 1712 | GTTGACTGGCGAAGTT | 18† | AA | 2118 |
| 1016728 | 14005 | 14020 | N/A | N/A | CAGATGACAATCAGGC | 19 | AA | 2119 |
| 1016752 | 8778 | 8793 | N/A | N/A | GTGGATGCGCGGGCAC | 67 | AA | 2120 |
| 1016776 | 9069 | 9084 | N/A | N/A | GTCTTGTACTGAGACA | 45 | AA | 2121 |
| 1016788 | 9282 | 9297 | N/A | N/A | TCAAAAAAGTTTCACG | 39 | AA | 2122 |
| 1016800 | 9552 | 9567 | N/A | N/A | CCTACTATGACCTTCC | 8 | AA | 2123 |
| 1016812 | 9683 | 9698 | N/A | N/A | TACGATTCCAAAACTG | 17 | AA | 2124 |
| 1016824 | 9818 | 9833 | N/A | N/A | GGCCTCGGTCTCCTCG | 72 | AA | 2125 |
| 1016836 | 10049 | 10064 | N/A | N/A | TCTTAGCTAGCTTCCT | 18 | AA | 2126 |
| 1016848 | 10277 | 10292 | N/A | N/A | ATCCATGGCTTCACAC | 16 | AA | 2127 |
| 1016860 | 10369 | 10384 | N/A | N/A | TCATGGTTAGTCTTGT | 15 | AA | 2128 |
| 1016872 | 10410 | 10425 | N/A | N/A | CCAAATTTTGTGCAGG | 13 | AA | 2129 |
| 1016884 | 10523 | 10538 | N/A | N/A | GTAACACTGATGTTTC | 12 | AA | 2130 |
| 1016896 | 10760 | 10775 | N/A | N/A | GTATAAATAAGAGGTC | 11 | AA | 2131 |
| 1016908 | 10977 | 10992 | N/A | N/A | TGGTGTGGGTCACCAG | 114 | AA | 2132 |
| 1016920 | 11365 | 11380 | N/A | N/A | CAAAATAGCTCCTTGG | 46 | AA | 2133 |
| 1016932 | 11859 | 11874 | N/A | N/A | TGCATGGAGAATCTCA | 17 | AA | 2134 |
| 1016940 | 12524 | 12539 | N/A | N/A | GACCTTACTCTGCCCC | 11 | AA | 2135 |
| 1016946 | 13098 | 13113 | N/A | N/A | GTTTTGTGGGACAGCT | 12 | AA | 2136 |
| 1016963 | 15336 | 15351 | N/A | N/A | CCAATCCTAGAGCTTC | 28 | AA | 2137 |
| 1017023 | 17735 | 17750 | N/A | N/A | GTATCCTGTTGCTTCC | 3 | AA | 2138 |
| 1017048 | 19881 | 19896 | N/A | N/A | CTGATTGTAAAAGTCT | 48 | AA | 2139 |
| 1017084 | 21697 | 21712 | N/A | N/A | AGAACTTCTGGCCTGT | 82 | AA | 2140 |
| 1017100 | 22087 | 22102 | N/A | N/A | GACTTCTCAGATCCCC | 4 | AA | 2141 |
| 1017113 | 22487 | 22502 | N/A | N/A | TACTCCTCCGTCCCCT | 79 | AA | 2142 |
| 1017123 | 22829 | 22844 | N/A | N/A | GACGGTGAGTCCGTCC | 76† | AA | 2143 |
| 1017127 | 23168 | 23183 | N/A | N/A | GGTCTTACATGGGAAG | 67 | AA | 2144 |
| 1017133 | 23673 | 23688 | N/A | N/A | GTGTTGATTGGCTGCC | 27 | AA | 2145 |
| 1017154 | 25160 | 25175 | N/A | N/A | GGCTAGAAAGTTTGCA | 130 | AA | 2146 |
| 1017166 | 25415 | 25430 | N/A | N/A | CGCTTTCTGCCTCCCC | 108 | AA | 2147 |
| 1017178 | 25658 | 25673 | N/A | N/A | AACTTTGGGAAGTTCC | 178 | AA | 2148 |
| 1017190 | 26162 | 26177 | N/A | N/A | CGCAGGTAGAGGTCCT | 137 | AA | 2149 |
| 1017202 | 26257 | 26272 | N/A | N/A | TGGTCTTGGGCAGCGG | 63 | AA | 2150 |
| 1017214 | 26496 | 26511 | N/A | N/A | TGGACTTGCGCCGCCC | 109 | AA | 2151 |
| 1017226 | 26843 | 26858 | N/A | N/A | AAGAGTAACGGTCAGT | 115 | AA | 2152 |
| 569664 | 19498 | 19513 | 1359 | 1374 | TCCCGAATGTCCGACA | 33 | BB | 1337 |
| 570263 | 14236 | 14251 | N/A | N/A | ATGTAGAATGTCCTGG | 22 | BB | 2154 |
| 570280 | 14320 | 14335 | N/A | N/A | GGAAATAAGACCCAGT | 9 | BB | 2155 |
| 570281 | 14323 | 14338 | N/A | N/A | GAAGGAAATAAGACCC | 17 | BB | 2156 |
| 1002435 | 15988 | 16003 | 742 | 757 | GTCTATGGCCATGACA | 64 | BB | 2159 |
| 1002462 | 16982 | 16997 | 1135 | 1150 | CTGAATGAAGTCTCGA | 19 | BB | 2160 |
| 1002546 | 24448 | 24463 | 2506 | 2521 | CACTTTGCGAACCAAC | 19 | BB | 2161 |
| 1002578 | 13958 | 13973 | N/A | N/A | TGTTAAACTGGGCAGC | 17 | BB | 2162 |
| 1002586 | 14029 | 14044 | N/A | N/A | TGCTTTAGTCCTACCC | 13 | BB | 2163 |
| 1002621 | 14469 | 14484 | N/A | N/A | GCCAAAAATGCCCTCC | 26 | BB | 2164 |
| 1002655 | 14981 | 14996 | N/A | N/A | TCGAGATAGTGAGACA | 92 | BB | 2165 |
| 1002704 | 13099 | 13114 | N/A | N/A | GGTTTTGTGGGACAGC | 18 | BB | 2166 |
| 1002750 | 13609 | 13624 | N/A | N/A | GCCACAAAAGGAGTGC | 99 | BB | 2167 |
| 1002821 | 15480 | 15495 | N/A | N/A | ATCTTTATAAGAGTCC | 26 | BB | 2168 |
| 1002848 | 15741 | 15756 | N/A | N/A | AACCATAGAGATCTGC | 12 | BB | 2169 |
| 1002862 | 16046 | 16061 | N/A | N/A | TGCTATCCCCTCGGCC | 84 | BB | 2170 |
| 1002883 | 16266 | 16281 | N/A | N/A | TGGGATAAATGAACCT | 75 | BB | 2171 |
| 1002899 | 16529 | 16544 | N/A | N/A | GTCTAATACTCCGCCA | 35 | BB | 2172 |
| 1002918 | 17242 | 17257 | N/A | N/A | ACTTTATGGAGGGAGC | 19 | BB | 2173 |
| 1002930 | 17319 | 17334 | N/A | N/A | AGTAGATGGGCACAGA | 3 | BB | 2174 |
| 1002965 | 17620 | 17635 | N/A | N/A | CAGTATTGTTCAGCAA | 6 | BB | 2175 |
| 1002988 | 19407 | 19422 | N/A | N/A | TTACATGTTCCCCCCA | 19 | BB | 2176 |
| 1003027 | 19801 | 19816 | N/A | N/A | GGTTACAAGATTCTGG | 1 | BB | 2177 |
| 1003031 | 19882 | 19897 | N/A | N/A | ACTGATTGTAAAAGTC | 97 | BB | 2178 |
| 1003043 | 20708 | 20723 | N/A | N/A | GGCACGATTTTTTCAA | 44 | BB | 2179 |
| 1003053 | 20929 | 20944 | N/A | N/A | ACGAGATATCAACTTC | 4 | BB | 2180 |
| 1003076 | 21114 | 21129 | N/A | N/A | AATGATAAGGTATAGT | 14 | BB | 2181 |
| 1003100 | 21214 | 21229 | N/A | N/A | AGCTATCCTGGACATG | 117 | BB | 2182 |
| 1003139 | 21725 | 21740 | N/A | N/A | CAGAATGCTGATTCTC | 67 | BB | 2183 |
| 1003198 | 22381 | 22396 | N/A | N/A | TAAATCTACACAGGGA | 86 | BB | 2184 |
| 1003226 | 22834 | 22849 | N/A | N/A | GTAAGGACGGTGAGTC | 99† | BB | 2185 |
| 1003249 | 23249 | 23264 | N/A | N/A | CCTATATCTGGACGGG | 65 | BB | 2186 |
| 1016710 | 24071 | 24086 | 2129 | 2144 | GGCACTCAGTCTTCCA | 83 | BB | 2187 |
| 1016736 | 14184 | 14199 | N/A | N/A | TAGATTCAGATGCAGG | 14 | BB | 2188 |
| 1016753 | 8813 | 8828 | N/A | N/A | TTCTTGCACACAAGGG | 48 | BB | 2189 |
| 1016765 | 8964 | 8979 | N/A | N/A | ACGAAAGGTCCTGCCA | 64 | BB | 2190 |
| 1016777 | 9081 | 9096 | N/A | N/A | AGGATCTGAGAGGTCT | 36 | BB | 2191 |
| 1016789 | 9303 | 9318 | N/A | N/A | CCTAGTTTTGGCCTGA | 16 | BB | 2192 |
| 1016801 | 9553 | 9568 | N/A | N/A | GCCTACTATGACCTTC | 13 | BB | 2193 |
| 1016813 | 9688 | 9703 | N/A | N/A | GACTCTACGATTCCAA | 10 | BB | 2194 |
| 1016825 | 9849 | 9864 | N/A | N/A | GTGACCTGGGCCAACT | 69 | BB | 2195 |
| 1016837 | 10050 | 10065 | N/A | N/A | ATCTTAGCTAGCTTCC | 19 | BB | 2196 |
| 1016849 | 10280 | 10295 | N/A | N/A | GATATCCATGGCTTCA | 46 | BB | 2197 |
| 1016861 | 10371 | 10386 | N/A | N/A | CATCATGGTTAGTCTT | 24 | BB | 2198 |
| 1016873 | 10411 | 10426 | N/A | N/A | CCCAAATTTTGTGCAG | 22 | BB | 2199 |
| 1016885 | 10529 | 10544 | N/A | N/A | ATGAGGGTAACACTGA | 15 | BB | 2200 |
| 1016897 | 10773 | 10788 | N/A | N/A | ACAGGGAACTTTAGTA | 33 | BB | 2201 |
| 1016909 | 10980 | 10995 | N/A | N/A | CGCTGGTGTGGGTCAC | 55 | BB | 2202 |
| 1016921 | 11403 | 11418 | N/A | N/A | AGTGGTGGAGCCAAGC | 19 | BB | 2203 |
| 1016933 | 11860 | 11875 | N/A | N/A | ATGCATGGAGAATCTC | 16 | BB | 2204 |
| 1016941 | 12580 | 12595 | N/A | N/A | AGCCTGCTGTGACTCC | 63 | BB | 2205 |
| 1016949 | 13324 | 13339 | N/A | N/A | GTCACACACAGTTTGT | 22 | BB | 2206 |
| 1016956 | 14809 | 14824 | N/A | N/A | AATTTCTAAGGCCCCG | 83 | BB | 2207 |
| 1016964 | 15354 | 15369 | N/A | N/A | CGTTTCCGGGCAGCAC | 18 | BB | 2208 |
| 1017012 | 17386 | 17401 | N/A | N/A | ACTGTCTGAAGACTGC | 70 | BB | 2209 |
| 1017024 | 17737 | 17752 | N/A | N/A | TTGTATCCTGTTGCTT | 6 | BB | 2210 |
| 1017037 | 19705 | 19720 | N/A | N/A | CAACTCTGGCCTCTTA | 27 | BB | 2211 |
| 1017065 | 21094 | 21109 | N/A | N/A | GTAATGTTGTCCAGTA | 1 | BB | 2212 |
| 1017076 | 21469 | 21484 | N/A | N/A | TCCCTTGACATGTGAC | 48 | BB | 2213 |
| 1017092 | 22001 | 22016 | N/A | N/A | GTCTCTCCGTGGTTTC | 9 | BB | 2214 |
| 1017101 | 22093 | 22108 | N/A | N/A | AAGATCGACTTCTCAG | 15 | BB | 2215 |
| 1017103 | 22232 | 22247 | N/A | N/A | GGAATGATTCAGCCAA | 16 | BB | 2216 |
| 1017114 | 22497 | 22512 | N/A | N/A | GTTTATCCCCTACTCC | 41 | BB | 2217 |
| 1017134 | 23698 | 23713 | N/A | N/A | GTCATTGGCTGCTTCC | 29 | BB | 2218 |
| 1017143 | 24814 | 24829 | N/A | N/A | GGACACTGTGGAGTCC | 93 | BB | 2219 |
| 1017155 | 25189 | 25204 | N/A | N/A | GGTCTGGCCGGGAGGA | 121 | BB | 2220 |
| 1017167 | 25438 | 25453 | N/A | N/A | TGTTTTCCCTCCGCCT | 134 | BB | 2221 |
| 1017179 | 25659 | 25674 | N/A | N/A | CAACTTTGGGAAGTTC | 116 | BB | 2222 |
| 1017191 | 26177 | 26192 | N/A | N/A | TCATGGTAGCGCGCGC | 78 | BB | 2223 |
| 1017203 | 26262 | 26277 | N/A | N/A | CCAGATGGTCTTGGGC | 77 | BB | 2224 |
| 1017215 | 26521 | 26536 | N/A | N/A | GTGGACGGGATGTCCC | 122 | BB | 2225 |
| 1017227 | 26844 | 26859 | N/A | N/A | TAAGAGTAACGGTCAG | 105 | BB | 2226 |

TABLE 4
Reduction of DMPK RNA by 3-10-3 cEt modified oligonucleotides with uniform
phosphorothioate internucleoside linkages at a dose of 2,000 nM

| | SEQ ID | SEQ ID | | | | |
|---|---|---|---|---|---|---|
| | NO: 3 | NO: 3 | | | | |
| Compound | Start | Stop | Nucleobase Sequence | DMPK | | SEQ ID |
| No. | Site | Site | (5′ to 3′) | (%UTC) | AID | NO |
| 1017240 | 18779 | 18794 | CGCATAGCCAGCCAGC | 93 | Q | 2227 |
| 1017241 | 18821 | 18836 | GAAATGGCTGTCAGCT | 105 | R | 2228 |
| 1017242 | 18825 | 18840 | CGGAGAAATGGCTGTC | 128 | T | 2229 |
| 1017232 | 18561 | 18576 | AAAGTTCCTTGGTTGG | 78 | U | 2230 |
| 1017243 | 18844 | 18859 | TCCCATCAGACTCGCT | 91 | U | 2231 |
| 1017244 | 18846 | 18861 | ATTCCCATCAGACTCG | 105 | U | 2232 |
| 1017233 | 18568 | 18583 | TGCCCTAAAAGTTCCT | 99 | V | 2233 |
| 1017245 | 18852 | 18867 | CGTGGGATTCCCATCA | 102 | V | 2234 |
| 1017234 | 18678 | 18693 | GCCTTTTGCAAGCCCT | 85 | W | 2235 |
| 1017246 | 18879 | 18894 | AGGACTTCGGCTGGAC | 106 | W | 2236 |
| 1017235 | 18679 | 18694 | GGCCTTTTGCAAGCCC | 69 | X | 2237 |
| 1017247 | 18886 | 18901 | GGTCCTCAGGACTTCG | 106 | X | 2238 |
| 1017236 | 18697 | 18712 | GACCACTCCAAACTCC | 101 | Y | 2239 |
| 1017237 | 18731 | 18746 | GTGGATCATTCCAGGG | 94 | Z | 2240 |
| 1017248 | 18942 | 18957 | GAATATGGAGCCCTGG | 122 | Z | 2241 |
| 1017238 | 18738 | 18753 | AGTTTCGGTGGATCAT | 87 | AA | 2242 |
| 1017249 | 18943 | 18958 | GGAATATGGAGCCCTG | 152 | AA | 2243 |
| 1017239 | 18739 | 18754 | AAGTTTCGGTGGATCA | 145 | BB | 2244 |
| 1017250 | 18945 | 18960 | CAGGAATATGGAGCCC | 58 | BB | 2245 |

TABLE 5
Reduction of DMPK RNA by 3-10-3 cEt modified oligonucleotides with uniform
phosphorothioate internucleoside linkages at a dose of 2,000 nM

| | SEQ ID | SEQ ID | | | | |
|---|---|---|---|---|---|---|
| | NO: 4 | NO: 4 | | | | |
| Compound | Start | Stop | Nucleobase Sequence | DMPK | | SEQ ID |
| No. | Site | Site | (5′ to 3′) | (%UTC) | AID | NO |
| 1002637 | 411 | 426 | CGCTCTAGATTCAGAT | 78 | W | 2246 |

TABLE 6
Reduction of DMPK RNA by 3-10-3 cEt modified oligonucleotides with uniform
phosphorothioate internucleoside linkages at a dose of 2,000 nM

| | SEQ ID | SEQ ID | | | | |
|---|---|---|---|---|---|---|
| | NO: 5 | NO: 5 | | | | |
| Compound | Start | Stop | Nucleobase Sequence | DMPK | | SEQ ID |
| No. | Site | Site | (5′ to 3′) | (%UTC) | AID | NO |
| 1002476 | 1335 | 1350 | TCCGACAGTGTCTCCA | 14 | W | 2247 |

### Example 3: Effect of 3-10-3 cET Modified Oligonucleotides with Uniform Phosphorothioate Internucleoside Linkages on Human DMPK In Vitro, Single Dose

[0347] Modified oligonucleotides complementary to human DMPK nucleic acid were synthesized and tested for their effect on DMPK RNA levels in vitro. The results are presented in the table below.

[0348] The modified oligonucleotides in the table below are 3-10-3 cEt modified oligonucleotides with uniform phosphorothioate internucleoside linkages. The modified oligonucleotides are 16 nucleosides in length. The sugar motif for the modified oligonucleotides is (from 5′ to 3′): kkkddddddddddkkk; wherein each ‘d’ represents a 2′-β-D-deoxyribosyl sugar moiety, and each ‘k’ represents a cEt sugar moiety. The internucleoside linkage motif for the modified oligonucleotides is (from 5′ to 3′): sssssssssssssss wherein each ‘s’ represents a phosphorothioate internucleoside linkage. All cytosine nucleobases are 5-methylcytosines.

[0349] “Start site” indicates the 5′-most nucleoside of the target sequence to which the modified oligonucleotide is complementary. “Stop site” indicates the 3′-most nucleoside of the target sequence to which the modified oligonucleotide is complementary. As shown in the tables below, the modified oligonucleotides are complementary to SEQ TD NO: 1 (described herein above) and/or SEQ ID NO: 2 (described herein above). ‘N/A’ indicates that the modified oligonucleotide is not 100% complementary to that particular target sequence.

[0350] Cultured A431 cells at a density of 10,000 cells per well were treated with 500 nM of modified oligonucleotide by free uptake as indicated in the tables below. After a treatment period of approximately 48 hours, RNA was isolated from the cells and DMPK RNA levels were measured by quantitative real-time RTPCR. Human DMPK primer probe set RTS38095 (described herein above) was used to measure DMPK RNA levels. DMPK RNA levels were normalized to total RNA content, as measured by RIBOGREEN®. Results are presented as percent of DMPK RNA, relative to the amount in untreated control cells (% UTC). ‘N.D.’ in the tables below refers to instances where the value was Not Defined.

[0351] Each separate experiment described in this example is identified by an Assay Identification letter in the table column labeled “AID”.

TABLE 7
Reduction of DMPK RNA by 3-10-3 cEt modified oligonucleotides with uniform phosphorothioate
internucleoside linkages at a dose of 500 nM

| | SEQ ID | SEQ ID | SEQ ID | SEQ ID | | | | |
|---|---|---|---|---|---|---|---|---|
| | NO: 1 | NO: 1 | NO: 2 | NO: 2 | | | | |
| Compound | Start | Stop | Start | Stop | Nucleobase Sequence | DMPK | | SEQ |
| No. | Site | Site | Site | Site | (5′ to 3′) | (%UTC) | AID | ID NO |
| 486107 | 24395 | 24410 | 2453 | 2468 | CCCGGCTTGCTGCCTT | 83 | CC | 2248 |
| 486108 | 24443 | 24458 | 2501 | 2516 | TGCGAACCAACGATAG | 26 | CC | 2249 |
| 569381 | 15023 | 15038 | 478 | 493 | CACCTGGCCCGTCTGC | 12 | CC | 2250 |
| 569394 | N/A | N/A | 533 | 548 | ACGACACCTCGCCCCT | 11 | CC | 2251 |
| 569400 | N/A | N/A | 539 | 554 | GGAAGCACGACACCTC | 32 | CC | 2252 |
| 569579 | 17021 | 17036 | 1174 | 1189 | ACCCCGGCCCAGCCGT | 90 | CC | 2253 |
| 569634 | 17136 | 17151 | 1289 | 1304 | AGTTGCATGTGTCGGT | N.D. | CC | 2254 |
| 569643 | 17154 | 17169 | 1307 | 1322 | CGTCCTCCACCAAGTC | 13 | CC | 2255 |
| 569644 | 17155 | 17170 | 1308 | 1323 | CCGTCCTCCACCAAGT | 27 | CC | 2256 |
| 569681 | 19542 | 19557 | 1403 | 1418 | AGGAGTAGCCCACAAA | 11 | CC | 2257 |
| 569684 | 19545 | 19560 | 1406 | 1421 | AGTAGGAGTAGCCCAC | 37 | CC | 2258 |
| 569800 | 21793 | 21808 | 1458 | 1473 | AGTTCCATGGGTGTGG | 27 | CC | 2259 |
| 569801 | 21794 | 21809 | 1459 | 1474 | CAGTTCCATGGGTGTG | N.D. | CC | 2260 |
| 569986 | 23941 | 23956 | 1999 | 2014 | GGCGGCGGCACGAGAC | 14 | CC | 2261 |
| 570433 | 13473 | 13488 | N/A | N/A | GGTTTTTCCAGAGGCT | N.D. | CC | 2262 |
| 570434 | 13474 | 13489 | N/A | N/A | AGGTTTTTCCAGAGGC | N.D. | CC | 2263 |
| 570435 | 13475 | 13490 | N/A | N/A | AAGGTTTTTCCAGAGG | N.D. | CC | 2264 |
| 570573 | 15621 | 15636 | N/A | N/A | GAGATGTTCTGGGAAA | N.D. | CC | 2265 |
| 570581 | 15637 | 15652 | N/A | N/A | CAGATTCACTCCCCCT | 3 | CC | 2266 |
| 570587 | 15707 | 15722 | N/A | N/A | ACCTGCGGCCCCCGCC | 47 | CC | 2267 |
| 570623 | 16301 | 16316 | N/A | N/A | GGTTTGATGTCCCTGC | 1 | CC | 2268 |
| 570724 | 17710 | 17725 | N/A | N/A | ACCTGCCACACTCTCC | 2 | CC | 2269 |
| 570725 | 17734 | 17749 | N/A | N/A | TATCCTGTTGCTTCCC | N.D. | CC | 2270 |
| 570730 | 19364 | 19379 | N/A | N/A | AAGTGGCCCCTCCAGC | N.D. | CC | 2271 |
| 570766 | 19663 | 19678 | N/A | N/A | GTTCCAAGACTGATCC | 8 | CC | 2272 |
| 570777 | 19715 | 19730 | N/A | N/A | TAAGGTCCTCCAACTC | 6 | CC | 2273 |
| 570793 | 20965 | 20980 | N/A | N/A | CGTGTGAGCCAGGGAC | N.D. | CC | 2274 |
| 570798 | 21053 | 21068 | N/A | N/A | GTTCTCTTAGACAAAG | 2 | CC | 2275 |
| 570800 | 21057 | 21072 | N/A | N/A | AACTGTTCTCTTAGAC | 8 | CC | 2276 |
| 570879 | 21984 | 21999 | N/A | N/A | GTCTGCTTCTGTTCAG | 30 | CC | 2277 |
| 570885 | 21996 | 22011 | N/A | N/A | TCCGTGGTTTCTGTCT | N.D. | CC | 2278 |
| 570886 | 22018 | 22033 | N/A | N/A | ATGTCTGAAGTAACCT | 25 | CC | 2279 |
| 570898 | 22160 | 22175 | N/A | N/A | GCTCTCGCCTGACCAC | 51 | CC | 2280 |
| 570900 | 22198 | 22213 | N/A | N/A | ATCAGGATTCCCACCT | 9 | CC | 2281 |
| 570917 | 22321 | 22336 | N/A | N/A | GCTGCTCAAAATCCCT | 49 | CC | 2282 |
| 570919 | 22332 | 22347 | N/A | N/A | TATGTCCCTCTGCTGC | 17 | CC | 2283 |
| 570925 | 22440 | 22455 | N/A | N/A | ATGATCCAAGCCCCCT | 10 | CC | 2284 |
| 570931 | 22467 | 22482 | N/A | N/A | ATTTCTGGAATCCCCA | 37 | CC | 2285 |
| 610291 | 24664 | 24679 | 2722 | 2737 | CCTGTAGCCTGTCAGC | 42 | CC | 2286 |
| 1016712 | 24121 | 24136 | 2179 | 2194 | AGCGGTTGTGAACTGG | 3 | CC | 1518 |
| 1277242 | 16713 | 16728 | 942 | 957 | CCAGGCCCACCGCCCA | 64 | CC | 2287 |
| 1277243 | 14525 | 14540 | N/A | N/A | AGGACTGTCTGCTTCC | 80 | CC | 2288 |
| 1277244 | 15508 | 15523 | N/A | N/A | CAGGTAAGAGACCCCC | 47 | CC | 2289 |
| 1277245 | 17274 | 17289 | N/A | N/A | GACCCCAGAAGGTAGG | 62 | CC | 2290 |
| 1277246 | 17469 | 17484 | N/A | N/A | GCCCTCCAGGACCTTC | 59 | CC | 2291 |
| 1277247 | 21063 | 21078 | N/A | N/A | AAAACCAACTGTTCTC | 2 | CC | 2292 |
| 1277248 | 21064 | 21079 | N/A | N/A | GAAAACCAACTGTTCT | 60 | CC | 2293 |
| 1277249 | 21162 | 21177 | N/A | N/A | CCCACCGTTCAGGCCC | 86 | CC | 2294 |
| 1277250 | 22333 | 22348 | N/A | N/A | CTATGTCCCTCTGCTG | N.D. | CC | 2295 |
| 1277255 | 24123 | 24138 | 2181 | 2196 | GGAGCGGTTGTGAACT | 10 | CC | 2296 |

### Example 4: Dose-Dependent Inhibition of Human DMPK in A431 Cells by Modified Oligonucleotides

[0352] Modified oligonucleotides selected from the examples above were tested at various doses in A431 cells. The modified oligonucleotides were tested in a series of experiments using the same culture conditions. The results for each experiment are presented in separate tables shown below. Cells were plated at a density of 10,000 cells per well and were transfected using free uptake with modified oligonucleotides at various doses, as specified in the tables below. After a treatment period of approximately 48 hours, DMPK RNA levels were measured as previously described using the human DMPK primer-probe set RTS38095 (described herein above). DMPK RNA levels were normalized to total RNA, as measured by RIBOGREEN®. Results are presented as percent DMPK RNA, relative to untreated control cells (% UTC).

[0353] The half maximal inhibitory concentration (IC₅₀) of each modified oligonucleotide was calculated using a linear regression on a log/linear plot of the data in Excel and is also presented in the tables below.

TABLE 8
Dose-dependent reduction of human DMPK RNA
in A431 cells by modified oligonucleotides

| Compound | DMPK RNA (% UTC) | | | | IC₅₀ |
|---|---|---|---|---|---|
| No. | 94 nM | 375 nM | 1500 nM | 6000 nM | (μM) |
| 1052867 | 92 | 54 | 42 | 27 | 0.96 |
| 1052881 | 118 | 88 | 50 | 21 | 1.69 |
| 1380447 | 83 | 61 | 52 | 32 | 1.39 |
| 1380564 | 70 | 43 | 26 | 36 | 0.37 |
| 1380586 | 69 | 59 | 38 | 24 | 0.6 |
| 1380634 | 72 | 64 | 59 | 49 | 5.65 |
| 1380656 | 65 | 52 | 32 | 20 | 0.37 |
| 1380659 | 37 | 15 | 4 | 2 | <0.09 |
| 1380700 | 82 | 61 | 54 | 46 | 2.77 |
| 1380725 | 94 | 66 | 36 | 16 | 0.89 |
| 1380740 | 43 | 30 | 16 | 15 | <0.09 |
| 1380782 | 81 | 48 | 33 | 23 | 0.57 |
| 1381015 | 105 | 75 | 54 | 45 | 2.89 |
| 1381203 | 70 | 55 | 25 | 20 | 0.42 |
| 1381332 | 61 | 36 | 22 | 14 | 0.17 |
| 1381407 | 87 | 81 | 49 | 42 | 2.5 |
| 1381435 | 76 | 51 | 32 | 25 | 0.54 |
| 1381513 | 56 | 23 | 10 | 4 | 0.08 |
| 1381668 | 44 | 22 | 18 | 12 | <0.09 |

TABLE 9
Dose-dependent reduction of human DMPK RNA
in A431 cells by modified oligonucleotides

| Compound | DMPK RNA (% UTC) | | | | IC₅₀ |
|---|---|---|---|---|---|
| No. | 94 nM | 375 nM | 1500 nM | 6000 nM | (μM) |
| 1380304 | 84 | 73 | 51 | 47 | 3.11 |
| 1380432 | 99 | 62 | 43 | 31 | 1.30 |
| 1380454 | 120 | 87 | 67 | 46 | 4.10 |
| 1380469 | 70 | 49 | 34 | 19 | 0.42 |
| 1380652 | 83 | 60 | 41 | 23 | 0.85 |
| 1380659 | 45 | 14 | 6 | 3 | <0.09 |
| 1380686 | 85 | 45 | 22 | 15 | 0.45 |
| 1380798 | 86 | 75 | 70 | 58 | >6 |
| 1380828 | 54 | 37 | 30 | 26 | 0.10 |
| 1380847 | 82 | 61 | 46 | 30 | 1.10 |
| 1381061 | 97 | 62 | 42 | 36 | 1.43 |
| 1381178 | 80 | 55 | 34 | 26 | 0.67 |
| 1381200 | 126 | 98 | 69 | 48 | 4.74 |
| 1381215 | 81 | 61 | 48 | 32 | 1.19 |
| 1381217 | 61 | 49 | 27 | 19 | 0.27 |
| 1381285 | 70 | 49 | 31 | 19 | 0.39 |
| 1381507 | 42 | 29 | 20 | 19 | <0.09 |
| 1381524 | 82 | 59 | 32 | 28 | 0.76 |
| 1381677 | 69 | 42 | 26 | 27 | 0.31 |

TABLE 10
Dose-dependent reduction of human DMPK RNA
in A431 cells by modified oligonucleotides

| Compound | DMPK RNA (% UTC) | | | | IC₅₀ |
|---|---|---|---|---|---|
| No. | 94 nM | 375 nM | 1500 nM | 6000 nM | (μM) |
| 1380294 | 81 | 74 | 57 | 40 | 2.69 |
| 1380322 | 62 | 57 | 36 | 28 | 0.46 |
| 1380405 | 123 | 113 | 106 | 123 | >6 |
| 1380647 | 97 | 53 | 60 | 51 | 3.73 |
| 1380693 | 57 | 38 | 22 | 12 | 0.14 |
| 1380765 | 100 | 90 | 106 | 86 | >6 |
| 1380777 | 119 | 93 | 56 | 15 | 1.72 |
| 1380785 | 96 | 85 | 61 | 62 | >6 |
| 1380857 | 92 | 75 | 57 | 40 | 2.63 |
| 1380862 | 83 | 83 | 69 | 56 | >6 |
| 1380868 | 76 | 58 | 52 | 41 | 1.72 |
| 1380870 | 78 | 56 | 49 | 25 | 0.89 |
| 1380892 | 135 | 96 | 64 | 38 | 3.17 |
| 1381156 | 91 | 65 | 56 | 45 | 2.83 |
| 1381159 | 87 | 67 | 50 | 35 | 1.63 |
| 1381170 | 70 | 54 | 45 | 29 | 0.7 |
| 1381214 | 85 | 93 | 60 | 52 | 8.16 |
| 1381657 | 73 | 61 | 42 | 34 | 0.98 |

TABLE 11
Dose-dependent reduction of human DMPK RNA
in A431 cells by modified oligonucleotides

| Compound | DMPK RNA (% UTC) | | | | IC₅₀ |
|---|---|---|---|---|---|
| No. | 94 nM | 375 nM | 1500 nM | 6000 nM | (μM) |
| 1380286 | 75 | 58 | 45 | 32 | 0.96 |
| 1380289 | 59 | 35 | 18 | 8 | 0.15 |
| 1380320 | 78 | 71 | 50 | 41 | 2.22 |
| 1380345 | 93 | 100 | 127 | 132 | >6 |
| 1380380 | 89 | 74 | 44 | 32 | 1.45 |
| 1380460 | 140 | 141 | 150 | 146 | >6 |
| 1380489 | 51 | 23 | 9 | 6 | 0.06 |
| 1380502 | 99 | 109 | 116 | 169 | >6 |
| 1380522 | 104 | 113 | 135 | 184 | >6 |
| 1380605 | 120 | 95 | 93 | 81 | >6 |
| 1380791 | 40 | 24 | 16 | 19 | <0.09 |
| 1380864 | 102 | 64 | 50 | 44 | 2.3 |
| 1380995 | 60 | 29 | 18 | 16 | 0.11 |
| 1381153 | 95 | 64 | 49 | 37 | 1.71 |
| 1381320 | 87 | 93 | 81 | 109 | >6 |
| 1381456 | 120 | 152 | 162 | 182 | >6 |
| 1381490 | 102 | 78 | 51 | 17 | 1.34 |
| 1381619 | 89 | 81 | 45 | 13 | 1.1 |

TABLE 12
Dose-dependent reduction of human DMPK RNA
in A431 cells by modified oligonucleotides

| Compound | DMPK RNA (% UTC) | | | | IC₅₀ |
|---|---|---|---|---|---|
| No. | 94 nM | 375 nM | 1500 nM | 6000 nM | (μM) |
| 1052879 | 36 | 23 | 9 | 4 | <0.09 |
| 1380330 | 100 | 113 | 99 | 134 | >10 |
| 1380358 | 108 | 81 | 52 | 39 | 2.4 |
| 1380431 | 69 | 48 | 31 | 25 | 0.39 |
| 1380598 | 72 | 54 | 44 | 27 | 0.7 |
| 1380630 | 55 | 44 | 37 | 26 | 0.19 |
| 1380679 | 61 | 34 | 22 | 12 | 0.16 |
| 1380701 | 90 | 62 | 56 | 61 | 9.48 |
| 1380721 | 69 | 41 | 28 | 28 | 0.31 |
| 1380821 | 67 | 43 | 24 | 23 | 0.28 |
| 1381021 | 65 | 49 | 33 | 37 | 0.43 |
| 1381059 | 79 | 45 | 31 | 19 | 0.48 |
| 1381083 | 60 | 70 | 46 | 37 | 1.2 |
| 1381132 | 119 | 73 | 65 | 39 | 2.86 |
| 1381176 | 78 | 57 | 41 | 26 | 0.79 |
| 1381183 | 87 | 58 | 44 | 39 | 1.4 |
| 1381554 | 85 | 64 | 46 | 47 | 2.32 |
| 1381603 | 97 | 79 | 65 | 39 | 3.27 |

TABLE 13
Dose-dependent reduction of human DMPK RNA
in A431 cells by modified oligonucleotides

| Compound | DMPK RNA (% UTC) | | | | IC₅₀ |
|---|---|---|---|---|---|
| No. | 94 nM | 375 nM | 1500 nM | 6000 nM | (μM) |
| 1380496 | 92 | 102 | 90 | 69 | >10 |
| 1380516 | 75 | 45 | 28 | 24 | 0.43 |
| 1380665 | 72 | 41 | 31 | 34 | 0.4 |
| 1380835 | 123 | 90 | 75 | 53 | 6.57 |
| 1382666 | 49 | 36 | 26 | 24 | <0.09 |
| 1382683 | 105 | 83 | 57 | 50 | 4.19 |
| 1382684 | 44 | 28 | 26 | 25 | <0.09 |
| 1382695 | 96 | 52 | 32 | 28 | 0.85 |
| 1382703 | 89 | 80 | 79 | 92 | >10 |
| 1382715 | 109 | 78 | 56 | 43 | 2.9 |
| 1382732 | 42 | 27 | 42 | 32 | N.D. |
| 1382734 | 55 | 44 | 38 | 38 | 0.15 |
| 1382741 | 60 | 34 | 23 | 26 | 0.13 |
| 1382751 | 60 | 46 | 41 | 33 | 0.32 |
| 1382753 | 50 | 34 | 28 | 20 | 0.06 |
| 1382755 | 60 | 38 | 25 | 32 | 0.15 |
| 1382760 | 68 | 45 | 37 | 34 | 0.45 |
| 1382761 | 133 | 65 | 59 | 55 | 3.74 |

TABLE 14
Dose-dependent reduction of human DMPK RNA
in A431 cells by modified oligonucleotides

| Compound | DMPK RNA (% UTC) | | | | IC₅₀ |
|---|---|---|---|---|---|
| No. | 94 nM | 375 nM | 1500 nM | 6000 nM | (μM) |
| 1380345 | 96 | 83 | 69 | 59 | >10 |
| 1380405 | 97 | 80 | 71 | 52 | >10 |
| 1380460 | 77 | 50 | 25 | 12 | 0.43 |
| 1380502 | 88 | 61 | 36 | 19 | 0.79 |
| 1380522 | 85 | 82 | 62 | 40 | 3.61 |
| 1380659 | 33 | 13 | 5 | 2 | 0.01 |
| 1380765 | 47 | 24 | 17 | 15 | <0.09 |
| 1381320 | 61 | 38 | 24 | 18 | 0.18 |
| 1381456 | 69 | 50 | 32 | 19 | 0.4 |

### Example 5: Dose-Dependent Inhibition of Human DMPK in A431 Cells by Modified Oligonucleotides

[0354] Modified oligonucleotides selected from the examples above were tested at various doses in A431 cells. The modified oligonucleotides were tested in a series of experiments using the same culture conditions. The results for each experiment are presented in separate tables shown below. Cells were plated at a density of 10,000 cells per well and were treated using free uptake with modified oligonucleotides at various doses, as specified in the tables below. After a treatment period of approximately 48 hours, DMPK RNA levels were measured as previously described using the human DMPK primer-probe set RTS38095 (described herein above). DMPK RNA levels were normalized to total RNA, as measured by RIBOGREEN®. Results are presented as percent DMPK RNA, relative to the amount in untreated control cells (% UTC). Modified oligonucleotides marked with a “†” indicate that the modified oligonucleotide is complementary to the amplicon region of the primer probe set. Additional assays may be used to measure the potency and efficacy of the modified oligonucleotides complementary to the amplicon region.

[0355] The half maximal inhibitory concentration (IC₅₀) of each modified oligonucleotide was calculated using a linear regression on a log/linear plot of the data in Excel and is also presented in the tables below.

[0356] Compound No. 486178 was previously described in WO 2015/021457 A2, WO 2017/053995 A1, and WO 2019/118916 A1 and consists of the nucleobase sequence (from 5′ to 3′): ACAATAAATACCGAGG, designated herein as SEQ ID NO: 1336. The sugar motif for Compound No. 486178 is (from 5′ to 3′): kkkddddddddddkkk; wherein each “d” represents a 2′-β-D-deoxyribosyl sugar moiety, and each “k” represents a cEt sugar moiety. The internucleoside linkage motif for Compound No. 486178 is (from 5′ to 3′): sssssssssssssss; wherein each “s” represents a phosphorothioate internucleoside linkage. Each cytosine nucleobase in Compound No. 486178 is a 5-methylcytosine.

[0357] Compound No. 598769 was previously described in WO 2015/021457 A2 and consists of the nucleobase sequence (from 5′ to 3′): TCCCGAATGTCCGACA, designated herein as SEQ ID NO: 1337. The sugar motif for Compound No. 598769 is (from 5′ to 3′): eekkddddddddkkee; wherein each “d” represents a 2′-β-D-deoxyribosyl sugar moiety, and each “k” represents a cEt sugar moiety. The internucleoside linkage motif for Compound No. 598769 is (from 5′ to 3′): sssssssssssssss; wherein each “s” represents a phosphorothioate internucleoside linkage. Each cytosine nucleobase in Compound No. 598769 is a 5-methylcytosine.

TABLE 15
Dose-dependent reduction of human DMPK RNA
in A431 cells by modified oligonucleotides

| Compound | DMPK RNA (% UTC) | | | | IC₅₀ |
|---|---|---|---|---|---|
| No. | 31 nM | 125 nM | 500 nM | 2000 nM | (μM) |
| 570785 | 24 | 6 | 2 | 3 | <0.03 |
| 570786 | 77 | 46 | 19 | 10 | 0.12 |
| 570787 | 34 | 8 | 3 | 3 | <0.03 |
| 570880 | 44 | 17 | 9 | 7 | <0.03 |
| 570901† | 38 | 15 | 6 | 5 | <0.03 |
| 1002989 | 52 | 22 | 9 | 5 | <0.03 |
| 1003066 | 12 | 5 | 4 | 3 | <0.03 |
| 1003079 | 50 | 20 | 6 | 4 | <0.03 |
| 1003178 | 40 | 18 | 7 | 5 | <0.03 |
| 1003179 | 63 | 18 | 8 | 7 | 0.03 |
| 1017017 | 46 | 13 | 6 | 4 | <0.03 |
| 1017025 | 26 | 10 | 3 | 4 | <0.03 |
| 1017026 | 44 | 14 | 7 | 3 | <0.03 |
| 1017041 | 19 | 4 | 1 | 2 | <0.03 |
| 1017042 | 16 | 4 | 2 | 2 | <0.03 |
| 1017049 | 46 | 20 | 11 | 8 | <0.03 |
| 1017066 | 11 | 4 | 3 | 4 | <0.03 |
| 1017093 | 34 | 15 | 7 | 8 | <0.03 |

TABLE 16
Dose-dependent reduction of human DMPK RNA
in A431 cells by modified oligonucleotides

| Compound | DMPK RNA (% UTC) | | | | IC₅₀ |
|---|---|---|---|---|---|
| No. | 31 nM | 125 nM | 500 nM | 2000 nM | (μM) |
| 570784 | 33 | 8 | 2 | 1 | <0.03 |
| 570795 | 49 | 19 | 7 | 2 | <0.03 |
| 570796 | 62 | 27 | 8 | 4 | 0.04 |
| 1002853 | 61 | 28 | 14 | 7 | 0.04 |
| 1003033 | 8 | 4 | 3 | 4 | <0.03 |
| 1003080 | 26 | 6 | 2 | 1 | <0.03 |
| 1003162 | 66 | 38 | 14 | 6 | 0.07 |
| 1016725 | 25 | 10 | 5 | 4 | <0.03 |
| 1017005 | 16 | 3 | 2 | 1 | <0.03 |
| 1017018 | 40 | 14 | 5 | 4 | <0.03 |
| 1017043 | 50 | 25 | 7 | 3 | <0.03 |
| 1017054 | 46 | 24 | 8 | 3 | <0.03 |
| 1017055 | 29 | 11 | 4 | 4 | <0.03 |
| 1017067 | 4 | 1 | 1 | 1 | <0.03 |
| 1017068 | 8 | 1 | 1 | 0 | <0.03 |
| 1017077 | 36 | 15 | 6 | 5 | <0.03 |
| 1017078 | 66 | 30 | 11 | 5 | 0.06 |
| 1017094 | 50 | 23 | 12 | 4 | <0.03 |

TABLE 17
Dose-dependent reduction of human DMPK RNA
in A431 cells by modified oligonucleotides

| Compound | DMPK RNA (% UTC) | | | | IC₅₀ |
|---|---|---|---|---|---|
| No. | 31 nM | 125 nM | 500 nM | 2000 nM | (μM) |
| 1002477 | 29 | 14 | 5 | 3 | <0.03 |
| 1002834 | 53 | 24 | 10 | 7 | <0.03 |
| 1003028 | 39 | 15 | 5 | 3 | <0.03 |
| 1003029 | 43 | 16 | 6 | 2 | <0.03 |
| 1003067 | 11 | 3 | 1 | 0 | <0.03 |
| 1003081 | 83 | 42 | 16 | 8 | 0.12 |
| 1016704 | 55 | 27 | 9 | 5 | <0.03 |
| 1016731 | 39 | 17 | 11 | 7 | <0.03 |
| 1016842 | 66 | 33 | 15 | 11 | 0.06 |
| 1016854 | 20 | 9 | 6 | 8 | <0.03 |
| 1017006 | 29 | 9 | 4 | 4 | <0.03 |
| 1017015 | 68 | 38 | 16 | 10 | 0.07 |
| 1017051 | 25 | 5 | 2 | 1 | <0.03 |
| 1017056 | 51 | 22 | 8 | 3 | <0.03 |
| 1017057 | 55 | 34 | 13 | 6 | 0.04 |
| 1017080 | 50 | 22 | 15 | 10 | <0.03 |
| 1017102 | 35 | 13 | 9 | 6 | <0.03 |

TABLE 18
Dose-dependent reduction of human DMPK RNA
in A431 cells by modified oligonucleotides

| Compound | DMPK RNA (% UTC) | | | | IC₅₀ |
|---|---|---|---|---|---|
| No. | 31 nM | 125 nM | 500 nM | 2000 nM | (μM) |
| 1002636 | 63 | 32 | 16 | 15 | 0.05 |
| 1002835 | 57 | 27 | 15 | 12 | 0.03 |
| 1002993 | 58 | 35 | 20 | 12 | 0.05 |
| 1003019 | 68 | 42 | 20 | 9 | 0.09 |
| 1003030 | 61 | 31 | 13 | 7 | 0.04 |
| 1003047 | 18 | 4 | 2 | 1 | <0.03 |
| 1003048 | 32 | 9 | 3 | 1 | <0.03 |
| 1003068 | 68 | 29 | 23 | 9 | 0.06 |
| 1003069 | 15 | 3 | 2 | 2 | <0.03 |
| 1003170 | 68 | 33 | 17 | 5 | 0.07 |
| 1016726 | 37 | 14 | 10 | 6 | <0.03 |
| 1016795 | 42 | 19 | 9 | 8 | <0.03 |
| 1016891 | 37 | 18 | 9 | 7 | <0.03 |
| 1016902 | 48 | 18 | 12 | 12 | <0.03 |
| 1016914 | 61 | 37 | 20 | 15 | 0.06 |
| 1017062 | 54 | 22 | 10 | 5 | <0.03 |
| 1017063 | 37 | 9 | 4 | 3 | <0.03 |

TABLE 19
Dose-dependent reduction of human DMPK RNA
in A431 cells by modified oligonucleotides

| Compound | DMPK RNA (% UTC) | | | | IC₅₀ |
|---|---|---|---|---|---|
| No. | 31 nM | 125 nM | 500 nM | 2000 nM | (μM) |
| 570732 | 91 | 50 | 20 | 13 | 0.18 |
| 570769 | 60 | 31 | 14 | 7 | 0.04 |
| 570779 | 60 | 28 | 12 | 5 | 0.04 |
| 1002583 | 26 | 12 | 8 | 7 | <0.03 |
| 1002934 | 46 | 16 | 6 | 9 | <0.03 |
| 1002947 | 52 | 20 | 7 | 3 | <0.03 |
| 1003020 | 71 | 42 | 14 | 6 | 0.09 |
| 1003061 | 65 | 23 | 7 | 2 | 0.04 |
| 1003070 | 18 | 5 | 3 | 16 | <0.03 |
| 1016773 | 39 | 15 | 9 | 13 | <0.03 |
| 1016892 | 67 | 26 | 13 | 12 | 0.05 |
| 1016970 | 55 | 26 | 12 | 8 | <0.03 |
| 1017001 | 85 | 44 | 20 | 17 | 0.15 |
| 1017002 | 59 | 30 | 8 | 2 | 0.04 |
| 1017009 | 52 | 24 | 9 | 10 | <0.03 |
| 1017045 | 71 | 36 | 20 | 6 | 0.08 |
| 1017073 | 49 | 27 | 9 | 5 | <0.03 |

TABLE 20
Dose-dependent reduction of human DMPK RNA
in A431 cells by modified oligonucleotides

| Compound | DMPK RNA (% UTC) | | | | IC₅₀ |
|---|---|---|---|---|---|
| No. | 31 nM | 125 nM | 500 nM | 2000 nM | (μM) |
| 570762 | 72 | 53 | 23 | 13 | 0.13 |
| 1002668 | 41 | 23 | 13 | 9 | <0.03 |
| 1002927 | 52 | 24 | 13 | 4 | <0.03 |
| 1003050 | 61 | 28 | 12 | 5 | 0.04 |
| 1003071 | 29 | 10 | 4 | 4 | <0.03 |
| 1016708† | 40 | 28 | 16 | 8 | <0.03 |
| 1016785 | 27 | 11 | 8 | 8 | <0.03 |
| 1016870 | 28 | 10 | 6 | 6 | <0.03 |
| 1016882 | 64 | 28 | 11 | 5 | 0.05 |
| 1016893 | 40 | 16 | 5 | 8 | <0.03 |
| 1016939 | 48 | 21 | 13 | 10 | <0.03 |
| 1016971 | 50 | 20 | 18 | 18 | <0.03 |
| 1017036 | 47 | 19 | 6 | 3 | <0.03 |
| 1017039 | 79 | 37 | 16 | 9 | 0.10 |
| 1017040 | 43 | 19 | 7 | 4 | <0.03 |
| 1017046 | 15 | 4 | 1 | 1 | <0.03 |
| 1017070 | 76 | 42 | 20 | 16 | 0.11 |

TABLE 21
Dose-dependent reduction of human DMPK RNA
in A431 cells by modified oligonucleotides

| Compound | DMPK RNA (% UTC) | | | | IC₅₀ |
|---|---|---|---|---|---|
| No. | 31 nM | 125 nM | 500 nM | 2000 nM | (μM) |
| 570218 | 29 | 13 | 7 | 7 | <0.03 |
| 1002576 | 65 | 44 | 34 | 18 | 0.10 |
| 1002929 | 64 | 28 | 12 | 15 | 0.04 |
| 1003007 | 59 | 26 | 7 | 4 | 0.04 |
| 1003025 | 70 | 27 | 10 | 14 | 0.06 |
| 1003026 | 41 | 14 | 10 | 2 | <0.03 |
| 1003051 | 60 | 17 | 5 | 1 | <0.03 |
| 1003064 | 54 | 57 | 10 | 5 | 0.07 |
| 1003072 | 50 | 34 | 11 | 15 | <0.03 |
| 1003075 | 54 | 22 | 6 | 3 | <0.03 |
| 1003097 | 71 | 41 | 24 | 11 | 0.10 |
| 1003123 | 48 | 24 | 6 | 4 | <0.03 |
| 1016871 | 17 | 7 | 6 | 12 | <0.03 |
| 1016948 | 48 | 23 | 16 | 9 | <0.03 |
| 1017003 | 74 | 38 | 12 | 5 | 0.09 |
| 1017016 | 46 | 14 | 2 | 2 | <0.03 |
| 1017023 | 37 | 13 | 11 | 13 | <0.03 |
| 1017100 | 43 | 17 | 7 | 4 | <0.03 |

TABLE 22
Dose-dependent reduction of human DMPK RNA
in A431 cells by modified oligonucleotides

| Compound | DMPK RNA (% UTC) | | | | IC₅₀ |
|---|---|---|---|---|---|
| No. | 31 nM | 125 nM | 500 nM | 2000 nM | (μM) |
| 486178 | 108 | 83 | 78 | 54 | >2.0 |
| 570280 | 53 | 36 | 11 | 5 | 0.04 |
| 1002586 | 25 | 11 | 8 | 22 | <0.03 |
| 1002847 | 68 | 46 | 22 | 10 | 0.10 |
| 1002848 | 71 | 43 | 20 | 12 | 0.10 |
| 1002930 | 48 | 18 | 8 | 4 | <0.03 |
| 1002965 | 72 | 32 | 16 | 7 | 0.07 |
| 1003027 | 13 | 4 | 1 | 2 | <0.03 |
| 1003053 | 67 | 38 | 9 | 6 | 0.07 |
| 1016800 | 60 | 28 | 10 | 12 | 0.04 |
| 1016801 | 52 | 19 | 13 | 10 | <0.03 |
| 1016813 | 39 | 13 | 9 | 7 | <0.03 |
| 1016896 | 59 | 36 | 15 | 8 | 0.05 |
| 1017024 | 41 | 20 | 8 | 3 | <0.03 |
| 1017065 | 15 | 4 | 16 | 1 | <0.03 |
| 1017092 | 54 | 22 | 17 | 17 | <0.03 |

TABLE 23
Dose-dependent reduction of human DMPK RNA
in A431 cells by modified oligonucleotides

| | | |
|---|---|---|
| Compound | DMPK RNA (% UTC) | IC₅₀ |

| No. | 8 nM | 31 nM | 125 nM | 500 nM | (μM) |
|---|---|---|---|---|---|
| 569381 | 122 | 70 | 39 | 21 | 0.11 |
| 569394 | 95 | 53 | 30 | 17 | 0.06 |
| 569681 | 79 | 69 | 41 | 16 | 0.07 |
| 570581 | 63 | 54 | 26 | 15 | 0.03 |
| 570623 | 72 | 45 | 26 | 49 | 0.05 |
| 570724 | 68 | 53 | 41 | 18 | 0.04 |
| 570766 | 90 | 77 | 28 | 19 | 0.08 |
| 570777 | 78 | 71 | 40 | 21 | 0.07 |
| 570798 | 94 | 64 | 30 | 10 | 0.06 |
| 570800 | 88 | 83 | 51 | 23 | 0.12 |
| 570900 | 47 | 62 | 34 | 20 | 0.02 |
| 570925 | 72 | 60 | 32 | 19 | 0.05 |
| 1016712 | 87 | 63 | 35 | 22 | 0.07 |
| 1277247 | 86 | 77 | 51 | 22 | 0.11 |
| 1277255 | 63 | 53 | 31 | 19 | 0.03 |

TABLE 24
Dose-dependent reduction of human DMPK RNA
in A431 cells by modified oligonucleotides

| | | |
|---|---|---|
| Compound | DMPK RNA (% UTC) | IC₅₀ |

| No. | 8 nM | 31 nM | 125 nM | 500 nM | (μM) |
|---|---|---|---|---|---|
| 569634 | 88 | 56 | 18 | 5 | 0.04 |
| 569643 | 69 | 57 | 34 | 21 | 0.04 |
| 569801 | 86 | 65 | 31 | 22 | 0.07 |
| 570433 | 43 | 24 | 8 | 7 | <0.01 |
| 570434 | 35 | 14 | 6 | 4 | <0.01 |
| 570435 | 61 | 32 | 10 | 7 | 0.01 |
| 570573 | 66 | 51 | 19 | 10 | 0.03 |
| 570725 | 85 | 57 | 21 | 4 | 0.04 |
| 570730 | 94 | 51 | 19 | 10 | 0.05 |
| 570793 | 63 | 49 | 19 | 9 | 0.02 |
| 570885 | 109 | 68 | 31 | 13 | 0.08 |
| 598769 | 109 | 75 | 42 | 27 | 0.12 |
| 1277250 | 98 | 63 | 41 | 22 | 0.09 |

### Example 6: Design of Modified Oligonucleotides Complementary to a Human DMPK Nucleic Acid

[0358] Modified oligonucleotides complementary to human DMPK nucleic acid were designed and synthesized. “Start site” indicates the 5′-most nucleoside of the target sequence to which the modified oligonucleotide is complementary. “Stop site” indicates the 3′-most nucleoside of the target sequence to which the modified oligonucleotide is complementary. As shown in the tables below, the modified oligonucleotides are complementary to SEQ ID NO: 1 (described herein above) and/or SEQ ID NO: 2 (described herein above). ‘N/A’ indicates that the modified oligonucleotide is not 100% complementary to that particular target sequence.

[0359] The modified oligonucleotides in the table below are 4-10-6 MOE modified oligonucleotides with mixed PO/PS backbone internucleoside linkages. The modified oligonucleotides are 20 nucleosides in length. The sugar motif for the modified oligonucleotides is (from 5′ to 3′): eeeeddddddddddeeeeee; wherein each ‘d’ represents a 2′-β-D-deoxyribosyl sugar moiety, and each ‘e’ represents a 2′-MOE sugar moiety. The internucleoside linkage motif for the modified oligonucleotides is (from 5′ to 3′): sooossssssssssoooss wherein each ‘s’ represents a phosphorothioate internucleoside linkage, and each ‘o’ represents a phosphodiester internucleoside linkage. All cytosine nucleobases are 5-methylcytosines.

TABLE 25
4-10-6 MOE modified oligonucleotides with mixed PS/PO internucleoside linkages
complementary to human DMPK

| | | SEQ ID | SEQ ID | SEQ ID | SEQ ID | |
|---|---|---|---|---|---|---|
| | | No: 1 | No: 1 | No: 2 | No: 2 | |
| Compound | Nucleobase Sequence | Start | Stop | Start | Stop | SEQ ID |
| No. | (5′ to 3′) | Site | Site | Site | Site | No. |
| 1459324 | GGGACAGACAATAAATACCG | 24733 | 24752 | 2791 | 2810 | 437 |
| 1459325 | GGACAGACAATAAATACCGA | 24732 | 24751 | 2790 | 2809 | 366 |
| 1459326 | GACAGACAATAAATACCGAG | 24731 | 24750 | 2789 | 2808 | 250 |
| 1459327 | ACAGACAATAAATACCGAGG | 24730 | 24749 | 2788 | 2807 | 173 |
| 1459328 | CAGACAATAAATACCGAGGA | 24729 | 24748 | 2787 | 2806 | 96 |
| 1459329 | AGACAATAAATACCGAGGAA | 24728 | 24747 | 2786 | 2805 | 18 |
| 1459330 | GACAATAAATACCGAGGAAT | 24727 | 24746 | 2785 | 2804 | 1020 |
| 1459343 | GCTTTAGTCCTACCCCTTAT | 14024 | 14043 | N/A | N/A | 402 |
| 1459344 | CTTTAGTCCTACCCCTTATT | 14023 | 14042 | N/A | N/A | 293 |
| 1459345 | AAGAATTTGCATTCTTTTAC | 19899 | 19918 | N/A | N/A | 1248 |
| 1459346 | AGAATTTGCATTCTTTTACA | 19898 | 19917 | N/A | N/A | 1249 |
| 1459348 | AATTTGCATTCTTTTACAAC | 19896 | 19915 | N/A | N/A | 1250 |
| 1459349 | ATTTGCATTCTTTTACAACT | 19895 | 19914 | N/A | N/A | 1251 |
| 1459351 | TTTGCATTCTTTTACAACTG | 19894 | 19913 | N/A | N/A | 313 |
| 1459352 | TTGCATTCTTTTACAACTGA | 19893 | 19912 | N/A | N/A | 249 |
| 1459353 | TGCATTCTTTTACAACTGAT | 19892 | 19911 | N/A | N/A | 1252 |
| 1459354 | GCATTCTTTTACAACTGATT | 19891 | 19910 | N/A | N/A | 160 |
| 1459355 | CATTCTTTTACAACTGATTG | 19890 | 19909 | N/A | N/A | 1253 |
| 1459356 | ATTCTTTTACAACTGATTGT | 19889 | 19908 | N/A | N/A | 1254 |
| 1459406 | CCATGGCTTGTTTCTCCTTC | 22125 | 22144 | N/A | N/A | 777 |
| 1459407 | CATGGCTTGTTTCTCCTTCA | 22124 | 22143 | N/A | N/A | 1255 |
| 1459408 | ATGGCTTGTTTCTCCTTCAC | 22123 | 22142 | N/A | N/A | 1256 |
| 1459409 | TGGCTTGTTTCTCCTTCACC | 22122 | 22141 | N/A | N/A | 1257 |
| 1459412 | CTTGTTTCTCCTTCACCAGC | 22119 | 22138 | N/A | N/A | 1258 |
| 1459413 | TTGTTTCTCCTTCACCAGCG | 22118 | 22137 | N/A | N/A | 1259 |
| 1459417 | GAGTGCTTTAGTCCTACCCC | 14028 | 14047 | N/A | N/A | 618 |
| 1459418 | AGTGCTTTAGTCCTACCCCT | 14027 | 14046 | N/A | N/A | 556 |
| 1459419 | GTGCTTTAGTCCTACCCCTT | 14026 | 14045 | N/A | N/A | 471 |
| 1459420 | TGCTTTAGTCCTACCCCTTA | 14025 | 14044 | N/A | N/A | 1260 |
| 1459985 | GCACCTTCCCGAATGTCCGA | 19500 | 19519 | 1361 | 1380 | 257 |
| 1459986 | TTCCCGAATGTCCGACAGTG | 19495 | 19514 | 1356 | 1375 | 1261 |
| 1459987 | TCCCGAATGTCCGACAGTGT | 19494 | 19513 | 1355 | 1374 | 1262 |
| 1459988 | TATTGTTATATGGCTGATTC | 19920 | 19939 | N/A | N/A | 647 |
| 1459989 | ATTGTTATATGGCTGATTCA | 19919 | 19938 | N/A | N/A | 588 |
| 1459990 | TTGTTATATGGCTGATTCAA | 19918 | 19937 | N/A | N/A | 1263 |
| 1459991 | TGTTATATGGCTGATTCAAA | 19917 | 19936 | N/A | N/A | 1264 |

[0360] The modified oligonucleotides in the table below are 4-8-6 MOE modified oligonucleotides with mixed PO/PS backbone internucleoside linkages. The modified oligonucleotides are 18 nucleosides in length. The sugar motif for the modified oligonucleotides is (from 5′ to 3′): eeeeddddddddeeeeee; wherein each ‘d’ represents a 2′-β-D-deoxyribosyl sugar moiety, and each ‘e’ represents a 2′-MOE sugar moiety. The internucleoside linkage motif for the modified oligonucleotides is (from 5′ to 3′): soosssssssssoooss wherein each ‘s’ represents a phosphorothioate internucleoside linkage, and each ‘o’ represents a phosphodiester internucleoside linkage. All cytosine nucleobases are 5-methylcytosines.

TABLE 26
4-8-6 MOE modified oligonucleotides with mixed PS/PO
internucleoside linkages complementary to human DMPK

| | | SEQ | SEQ | |
|---|---|---|---|---|
| | | ID | ID | |
| | | No: 1 | No: 1 | |
| Compound | Nucleobase Sequence | Start | Stop | SEQ ID |
| No. | (5′ to 3′) | Site | Site | No. |
| 1459421 | ATGGCTTGTTTCTCCTTC | 22125 | 22142 | 1265 |
| 1459422 | ATTTGCATTCTTTTACAA | 19897 | 19914 | 1266 |
| 1459423 | TTTGCATTCTTTTACAAC | 19896 | 19913 | 1267 |
| 1459424 | TTGCATTCTTTTACAACT | 19895 | 19912 | 1268 |
| 1459425 | TGCATTCTTTTACAACTG | 19894 | 19911 | 1269 |
| 1459426 | GCATTCTTTTACAACTGA | 19893 | 19910 | 1270 |
| 1459427 | CATTCTTTTACAACTGAT | 19892 | 19909 | 1271 |
| 1459428 | ATTCTTTTACAACTGATT | 19891 | 19908 | 1272 |
| 1459429 | TTCTTTTACAACTGATTG | 19890 | 19907 | 1273 |
| 1459450 | CTTGTTTCTCCTTCACCA | 22121 | 22138 | 1274 |
| 1459455 | TTGTTTCTCCTTCACCAG | 22120 | 22137 | 1275 |
| 1459462 | TGTTTCTCCTTCACCAGC | 22119 | 22136 | 1276 |
| 1459465 | GTTTCTCCTTCACCAGCG | 22118 | 22135 | 1277 |

[0361] The modified oligonucleotides in the table below are 5-10-5 MOE modified oligonucleotides with mixed PO/PS backbone internucleoside linkages. The modified oligonucleotides are 20 nucleosides in length. The sugar motif for the modified oligonucleotides is (from 5′ to 3′): eeeeeddddddddddeeeee; wherein each ‘d’ represents a 2′-β-D-deoxyribosyl sugar moiety, and each ‘e’ represents a 2′-MOE sugar moiety. The internucleoside linkage motif for the modified oligonucleotides is (from 5′ to 3′): soooossssssssssooss wherein each ‘s’ represents a phosphorothioate internucleoside linkage, and each ‘o’ represents a phosphodiester internucleoside linkage. All cytosine nucleobases are 5-methylcytosines.

TABLE 27
5-10-5 MOE modified oligonucleotides with mixed PS/PO internucleoside linkages
complementary to human DMPK

| | | SEQ ID | SEQ ID | SEQ ID | SEQ ID | |
|---|---|---|---|---|---|---|
| | | No: 1 | No: 1 | No: 2 | No: 2 | |
| Compound | Nucleobase Sequence | Start | Stop | Start | Stop | SEQ ID |
| No. | (5′ to 3′) | Site | Site | Site | Site | No. |
| 1052871 | TCCCGAATGTCCGACAGTGT | 19494 | 19513 | 1355 | 1374 | 1262 |
| 1052877 | GTAATGTTGTCCAGTAATAA | 21090 | 21109 | N/A | N/A | 1278 |
| 1052883 | GTATGTGTAATGTTGTCCAG | 21096 | 21115 | N/A | N/A | 1279 |
| 1052887 | CGGAGCGGTTGTGAACTGGC | 24120 | 24139 | 2178 | 2197 | 1280 |
| 1052889 | CTCGGAGCGGTTGTGAACTG | 24122 | 24141 | 2180 | 2199 | 1281 |
| 1380457 | TTGTTATATGGCTGATTCAA | 19918 | 19937 | N/A | N/A | 1263 |
| 1380571 | TGTTATATGGCTGATTCAAA | 19917 | 19936 | N/A | N/A | 1264 |
| 1380962 | CTCAGTAGTAGATGGGCACA | 17321 | 17340 | N/A | N/A | 1282 |
| 1459383 | CATGGCTTGTTTCTCCTTCA | 22124 | 22143 | N/A | N/A | 1255 |
| 1459386 | GCTTGTTTCTCCTTCACCAG | 22120 | 22139 | N/A | N/A | 1283 |
| 1459387 | CTTGTTTCTCCTTCACCAGC | 22119 | 22138 | N/A | N/A | 1258 |
| 1459392 | TGCTTTAGTCCTACCCCTTA | 14025 | 14044 | N/A | N/A | 1260 |
| 1459393 | AAGAATTTGCATTCTTTTAC | 19899 | 19918 | N/A | N/A | 1248 |
| 1459394 | AGAATTTGCATTCTTTTACA | 19898 | 19917 | N/A | N/A | 1249 |
| 1459395 | GAATTTGCATTCTTTTACAA | 19897 | 19916 | N/A | N/A | 1284 |
| 1459396 | AATTTGCATTCTTTTACAAC | 19896 | 19915 | N/A | N/A | 1250 |
| 1459398 | ATTTGCATTCTTTTACAACT | 19895 | 19914 | N/A | N/A | 1251 |
| 1459399 | TGCATTCTTTTACAACTGAT | 19892 | 19911 | N/A | N/A | 1252 |
| 1459400 | CATTCTTTTACAACTGATTG | 19890 | 19909 | N/A | N/A | 1253 |
| 1459401 | ATTCTTTTACAACTGATTGT | 19889 | 19908 | N/A | N/A | 1254 |
| 1459402 | TTCTTTTACAACTGATTGTA | 19888 | 19907 | N/A | N/A | 1285 |
| 1460162 | CTCAACATTTCTGGAATCCC | 22469 | 22488 | N/A | N/A | 1286 |
| 1460163 | ACCCCCATGTTCTAGGGTCA | 21495 | 21514 | N/A | N/A | 1287 |
| 1460164 | ACATCTTTATAAGAGTCCCC | 15478 | 15497 | N/A | N/A | 1288 |
| 1460166 | GCCTATTTTTTAATTTCAGT | 18057 | 18076 | N/A | N/A | 1289 |
| 1460168 | GCCCCATCATTTTTTCTTGT | 17749 | 17768 | N/A | N/A | 1290 |
| 1460170 | CACACCACCTCTTTTCCCCT | 16484 | 16503 | N/A | N/A | 1291 |
| 1460171 | CCTATTTTTTAATTTCAGTT | 18056 | 18075 | N/A | N/A | 1292 |
| 1460174 | CTCAGATAGGGAAGGCCCCT | 15416 | 15435 | N/A | N/A | 1293 |
| 1460178 | CTTACATGTTCCCCCCAAAC | 19404 | 19423 | N/A | N/A | 1294 |
| 1460179 | CTGCCCAAGGCCTTTGCCCT | 22180 | 22199 | N/A | N/A | 1295 |
| 1460184 | CACACAGTTTGTTACACACA | 13316 | 13335 | N/A | N/A | 1296 |
| 1460185 | CTTGTTTATCCCCTACTCCT | 22496 | 22515 | N/A | N/A | 1297 |
| 1511076 | GCACTCTTCCCTGCGCCCCG | 23779 | 23798 | N/A | N/A | 1298 |
| 1511078 | CTCACCTGTGGCTCCCTCTG | 22943 | 22962 | N/A | N/A | 1299 |
| 1511079 | ATCCTTGTTTATCCCCTACT | 22499 | 22518 | N/A | N/A | 1300 |
| 1511080 | CCTTCCATGGCTTGTTTCTC | 22129 | 22148 | N/A | N/A | 1301 |
| 1511081 | GCCCTCACCTTTTCTCTCCC | 21924 | 21943 | N/A | N/A | 1302 |
| 1511082 | CTCACCTTTTCTCTCCCAAT | 21921 | 21940 | N/A | N/A | 1303 |
| 1511083 | ACTTCCTTTTCCTTATCTGT | 20914 | 20933 | N/A | N/A | 1304 |
| 1511084 | CTTCCTTTTCCTTATCTGTA | 20913 | 20932 | N/A | N/A | 1305 |
| 1511085 | TTCCTTATCTGTATTTTCTA | 20906 | 20925 | N/A | N/A | 1306 |
| 1511086 | TCTCCATCTTCTGACCTCAA | 19121 | 19140 | N/A | N/A | 1307 |
| 1511087 | CTCAGCTGTTGTAGTCCCAA | 19088 | 19107 | N/A | N/A | 1308 |
| 1511088 | GCCCAGTTCTGTTTTTTTTT | 18994 | 19013 | N/A | N/A | 1309 |
| 1511089 | ATCATTTTTTCTTGTATCCT | 17744 | 17763 | N/A | N/A | 1310 |
| 1511090 | ACTCCATTGTCTCAGCCCTG | 17418 | 17437 | N/A | N/A | 1311 |
| 1511091 | CTTGCCATAGGTCTCCGCCG | 16824 | 16843 | 1053 | 1072 | 1312 |
| 1511092 | ACCACCTCTTTTCCCCTCCA | 16481 | 16500 | N/A | N/A | 1313 |
| 1511093 | CCACCTCTTTTCCCCTCCAA | 16480 | 16499 | N/A | N/A | 1314 |
| 1511094 | ACCTCTTTTCCCCTCCAAAT | 16478 | 16497 | N/A | N/A | 1315 |
| 1511095 | GCTCTTGTCCCTCTTCCTAG | 15283 | 15302 | N/A | N/A | 1316 |
| 1511096 | GTCCCTCTTCCTAGTCACCC | 15277 | 15296 | N/A | N/A | 1317 |
| 1511097 | TCCCTCTTCCTAGTCACCCC | 15276 | 15295 | N/A | N/A | 1318 |
| 1511098 | TCCACCCGCTTCTGCACCCA | 14917 | 14936 | N/A | N/A | 1319 |
| 1511099 | CCCTCTGTCTGTCTCCCCTT | 14565 | 14584 | N/A | N/A | 1320 |
| 1511100 | CTCCCCTTCTCTCTGCCTCT | 14553 | 14572 | N/A | N/A | 1321 |
| 1511101 | CCTTCTCTCTGCCTCTCAGC | 14549 | 14568 | N/A | N/A | 1322 |
| 1511102 | CTGCCTCTCAGCTTCACCCT | 14541 | 14560 | N/A | N/A | 1323 |
| 1511103 | CTGGCCCTTCTTGGCCTCCA | 13446 | 13465 | N/A | N/A | 1324 |
| 1511104 | GCCCTTCTTGGCCTCCACCT | 13443 | 13462 | N/A | N/A | 1325 |
| 1511105 | CCTTCCAGCCCTGGCCCCAG | 13140 | 13159 | N/A | N/A | 1326 |
| 1511106 | CCTGCCATCCTGCCCCCCCA | 12413 | 12432 | N/A | N/A | 1327 |
| 1511107 | CTGCCATCCTGCCCCCCCAA | 12412 | 12431 | N/A | N/A | 1328 |
| 1511077 | CTGCCGTGGGCCCAGCCCCG | 23638 | 23657 | N/A | N/A | 1329 |

[0362] The modified oligonucleotides in the table below are 5-8-5 MOE modified oligonucleotides with mixed PO/PS backbone internucleoside linkages. The modified oligonucleotides are 18 nucleosides in length. The sugar motif for the modified oligonucleotides is (from 5′ to 3′): eeeeeddddddddeeeee; wherein each ‘d’ represents a 2′-β-D-deoxyribosyl sugar moiety, and each ‘e’ represents a 2′-MOE sugar moiety. The internucleoside linkage motif for the modified oligonucleotides is (from 5′ to 3′): sooosssssssssooss wherein each ‘s’ represents a phosphorothioate internucleoside linkage, and each ‘o’ represents a phosphodiester internucleoside linkage. All cytosine nucleobases are 5-methylcytosines.

TABLE 28
5-8-5 MOE modified oligonucleotides with mixed PS/PO
internucleoside linkages complementary to human DMPK

| | | SEQ | SEQ | |
|---|---|---|---|---|
| | | ID | ID | |
| | | No: 1 | No: 1 | |
| Compound | Nucleobase Sequence | Start | Stop | SEQ ID |
| No. | (5′ to 3′) | Site | Site | No. |
| 1459449 | GGCTTGTTTCTCCTTCAC | 22123 | 22140 | 1330 |
| 1459451 | CTTGTTTCTCCTTCACCA | 22121 | 22138 | 1274 |
| 1459452 | TTGTTTCTCCTTCACCAG | 22120 | 22137 | 1275 |
| 1459453 | TGTTTCTCCTTCACCAGC | 22119 | 22136 | 1276 |
| 1459456 | ATTTGCATTCTTTTACAA | 19897 | 19914 | 1266 |
| 1459457 | TTTGCATTCTTTTACAAC | 19896 | 19913 | 1267 |
| 1459458 | TTGCATTCTTTTACAACT | 19895 | 19912 | 1268 |
| 1459459 | TGCATTCTTTTACAACTG | 19894 | 19911 | 1269 |
| 1459461 | CATTCTTTTACAACTGAT | 19892 | 19909 | 1271 |
| 1459463 | ATTCTTTTACAACTGATT | 19891 | 19908 | 1272 |
| 1459464 | TTCTTTTACAACTGATTG | 19890 | 19907 | 1273 |

[0363] The modified oligonucleotides in the table below are 6-10-4 MOE modified oligonucleotides with mixed PO/PS backbone internucleoside linkages. The modified oligonucleotides are 20 nucleosides in length. The sugar motif for the modified oligonucleotides is (from 5′ to 3′): eeeeeeddddddddddeeee; wherein each ‘d’ represents a 2′-β-D-deoxyribosyl sugar moiety, and each ‘e’ represents a 2′-MOE sugar moiety. The internucleoside linkage motif for the modified oligonucleotides is (from 5′ to 3′): sooooossssssssssoss wherein each ‘s’ represents a phosphorothioate internucleoside linkage, and each ‘o’ represents a phosphodiester internucleoside linkage. All cytosine nucleobases are 5-methylcytosines.

TABLE 29
6-10-4 MOE modified oligonucleotides with mixed PS/PO internucleoside linkages
complementary to human DMPK

| | | SEQ | SEQ | SEQ | SEQ | |
|---|---|---|---|---|---|---|
| | | ID | ID | ID | ID | |
| | | No: 1 | No: 1 | No: 2 | No: | |
| Compound | Nucleobase Sequence | Start | Stop | Start | 2 Stop | SEQ |
| No. | (5′ to 3′) | Site | Site | Site | Site | ID No. |
| 1459314 | GGGACAGACAATAAATACCG | 24733 | 24752 | 2791 | 2810 | 437 |
| 1459315 | GCCTTATTGTTATATGGCTG | 19924 | 19943 | N/A | N/A | 972 |
| 1459320 | GGACAGACAATAAATACCGA | 24732 | 24751 | 2790 | 2809 | 366 |
| 1459322 | GACAGACAATAAATACCGAG | 24731 | 24750 | 2789 | 2808 | 250 |
| 1459323 | ACAGACAATAAATACCGAGG | 24730 | 24749 | 2788 | 2807 | 173 |
| 1459359 | GGAGTGCTTTAGTCCTACCC | 14029 | 14048 | N/A | N/A | 692 |
| 1459360 | GAGTGCTTTAGTCCTACCCC | 14028 | 14047 | N/A | N/A | 618 |
| 1459364 | TGCTTTAGTCCTACCCCTTA | 14025 | 14044 | N/A | N/A | 1260 |
| 1459365 | GCTTTAGTCCTACCCCTTAT | 14024 | 14043 | N/A | N/A | 402 |
| 1459366 | CTTTAGTCCTACCCCTTATT | 14023 | 14042 | N/A | N/A | 293 |
| 1459367 | AAGAATTTGCATTCTTTTAC | 19899 | 19918 | N/A | N/A | 1248 |
| 1459368 | AGAATTTGCATTCTTTTACA | 19898 | 19917 | N/A | N/A | 1249 |
| 1459369 | GAATTTGCATTCTTTTACAA | 19897 | 19916 | N/A | N/A | 1284 |
| 1459372 | ATTTGCATTCTTTTACAACT | 19895 | 19914 | N/A | N/A | 1251 |
| 1459373 | TTTGCATTCTTTTACAACTG | 19894 | 19913 | N/A | N/A | 313 |
| 1459374 | TTGCATTCTTTTACAACTGA | 19893 | 19912 | N/A | N/A | 249 |
| 1459375 | TGCATTCTTTTACAACTGAT | 19892 | 19911 | N/A | N/A | 1252 |
| 1459377 | CATTCTTTTACAACTGATTG | 19890 | 19909 | N/A | N/A | 1253 |
| 1459378 | ATTCTTTTACAACTGATTGT | 19889 | 19908 | N/A | N/A | 1254 |
| 1459379 | TTCTTTTACAACTGATTGTA | 19888 | 19907 | N/A | N/A | 1285 |
| 1459415 | CTTGTTTCTCCTTCACCAGC | 22119 | 22138 | N/A | N/A | 1258 |
| 1459973 | GCGCACCTTCCCGAATGTCC | 19502 | 19521 | 1363 | 1382 | 434 |
| 1459974 | CGCACCTTCCCGAATGTCCG | 19501 | 19520 | 1362 | 1381 | 358 |
| 1459975 | GCACCTTCCCGAATGTCCGA | 19500 | 19519 | 1361 | 1380 | 257 |
| 1459976 | CACCTTCCCGAATGTCCGAC | 19499 | 19518 | 1360 | 1379 | 174 |
| 1459977 | ACCTTCCCGAATGTCCGACA | 19498 | 19517 | 1359 | 1378 | 97 |
| 1459978 | TTCCCGAATGTCCGACAGTG | 19495 | 19514 | 1356 | 1375 | 1261 |
| 1459979 | TCCCGAATGTCCGACAGTGT | 19494 | 19513 | 1355 | 1374 | 1262 |
| 1459980 | TATTGTTATATGGCTGATTC | 19920 | 19939 | N/A | N/A | 647 |
| 1459981 | ATTGTTATATGGCTGATTCA | 19919 | 19938 | N/A | N/A | 588 |
| 1459982 | TTGTTATATGGCTGATTCAA | 19918 | 19937 | N/A | N/A | 1263 |
| 1459983 | TGTTATATGGCTGATTCAAA | 19917 | 19936 | N/A | N/A | 1264 |

[0364] The modified oligonucleotides in the table below are 6-8-4 MOE modified oligonucleotides with mixed PO/PS backbone internucleoside linkages. The modified oligonucleotides are 18 nucleosides in length. The sugar motif for the modified oligonucleotides is (from 5′ to 3′): eeeeeeddddddddeeee; wherein each ‘d’ represents a 2′-β-D-deoxyribosyl sugar moiety, and each ‘e’ represents a 2′-MOE sugar moiety. The internucleoside linkage motif for the modified oligonucleotides is (from 5′ to 3′): soooosssssssssoss wherein each ‘s’ represents a phosphorothioate internucleoside linkage, and each ‘o’ represents a phosphodiester internucleoside linkage. All cytosine nucleobases are 5-methylcytosines.

TABLE 30
6-8-4 MOE modified oligonucleotides with mixed PS/PO
internucleoside linkages complementary to human DMPK

| | | SEQ | SEQ | |
|---|---|---|---|---|
| | | ID | ID | |
| | | No: 1 | No: 1 | |
| Compound | Nucleobase Sequence | Start | Stop | SEQ ID |
| No. | (5′ to 3′) | Site | Site | No. |
| 1459433 | TGGCTTGTTTCTCCTTCA | 22124 | 22141 | 1331 |
| 1459434 | GGCTTGTTTCTCCTTCAC | 22123 | 22140 | 1330 |
| 1459435 | CTTGTTTCTCCTTCACCA | 22121 | 22138 | 1274 |
| 1459436 | TTGTTTCTCCTTCACCAG | 22120 | 22137 | 1275 |
| 1459437 | TGTTTCTCCTTCACCAGC | 22119 | 22136 | 1276 |
| 1459438 | GTTTCTCCTTCACCAGCG | 22118 | 22135 | 1277 |
| 1459439 | ATTTGCATTCTTTTACAA | 19897 | 19914 | 1266 |
| 1459440 | TTTGCATTCTTTTACAAC | 19896 | 19913 | 1267 |
| 1459441 | TTGCATTCTTTTACAACT | 19895 | 19912 | 1268 |
| 1459442 | TGCATTCTTTTACAACTG | 19894 | 19911 | 1269 |
| 1459443 | GCATTCTTTTACAACTGA | 19893 | 19910 | 1270 |
| 1459444 | CATTCTTTTACAACTGAT | 19892 | 19909 | 1271 |
| 1459445 | ATTCTTTTACAACTGATT | 19891 | 19908 | 1272 |
| 1459446 | TTCTTTTACAACTGATTG | 19890 | 19907 | 1273 |

[0365] The modified oligonucleotides in the table below are modified oligonucleotides with mixed sugars and uniform phosphorothioate internucleoside linkages. The modified oligonucleotides are 16 nucleosides in length. The sugar motif for the modified oligonucleotides is described in the column “Sugar Motif (from 5′ to 3′)” in the table below; wherein each ‘d’ represents a 2′-β-D-deoxyribosyl sugar moiety, each ‘e’ represents a 2′-MOE sugar moiety, each “y” represents a 2′-O-methylribosyl sugar moiety and each ‘k’ represents a cEt sugar moiety. The internucleoside linkage motif for the modified oligonucleotides is (from 5′ to 3′): sssssssssssssss wherein each ‘s’ represents a phosphorothioate internucleoside linkage. All cytosine nucleobases are 5-methylcytosines.

TABLE 31
Mixed cET/MOE modified oligonucleotides with uniform phosphorothioate internucleoside
linkages complementary to human DMPK

| | | SEQ | SEQ | SEQ | SEQ | | |
|---|---|---|---|---|---|---|---|
| | | ID | ID | ID | ID | | |
| | | No: 1 | No: 1 | No: 2 | No: 2 | | |
| Compound | Nucleobase Sequence | Start | Stop | Start | Stop | Sugar Motif | SEQ |
| No. | (5′ to 3′) | Site | Site | Site | Site | (from 5′ to 3′) | ID No. |
| 1338115 | GTTATATGGCTGATTC | 19920 | 19935 | N/A | N/A | kkkedddddddddkkk | 1332 |
| 1400761 | ATGTGTAATGTTGTCC | 21098 | 21113 | N/A | N/A | kkkedddddddddkkk | 1333 |
| 1400744 | ACCTUCCCGAATGTCC | 19502 | 19517 | 1363 | 1378 | kkkdyddddddddkkk | 1334 |
| 1400776 | CTTTTATTCGCGAGGG | 24775 | 24790 | 2833 | 2848 | kkeddddddddddkkk | 1335 |

[0366] The modified oligonucleotide in the table below is 16 nucleosides in length. The sugar motif for the modified oligonucleotide is (from 5′ to 3′): kekddddddddddkkk; wherein each ‘d’ represents a 2′-β-D-deoxyribosyl sugar moiety, each ‘e’ represents a 2′-MOE sugar moiety, and each ‘k’ represents a cEt sugar moiety. The internucleoside linkage motif for the modified oligonucleotide is (from 5′ to 3′): sssssssssssssss wherein each ‘s’ represents a phosphorothioate internucleoside linkage. All cytosine nucleobases are 5-methylcytosines. Further, the modified oligonucleotide in the table below is conjugated to a 6-palmitamidohexyl phosphate conjugate group attached to the 5′-OH of the oligonucleotide. The structure for the conjugate group is:

[chemical structure]

TABLE 32
6-palmitamidohexyl phosphate conjugated mixed cET/MOE
modified oligonucleotide with uniform phosphorothioate
internucleoside linkages complementary to human DMPK

| | | SEQ ID | SEQ ID | |
|---|---|---|---|---|
| | | No: 1 | No: 1 | SEQ |
| Compound | Nucleobase Sequence | Start | Stop | ID |
| No. | (5′ to 3′) | Site | Site | No. |
| 1273291 | GTTATATGGCTGATTC | 19920 | 19935 | 1332 |

### Example 7: Design of Modified Oligonucleotides Complementary to a Human DMPK Nucleic Acid

[0367] Modified oligonucleotides complementary to human DMPK nucleic acid were synthesized. “Start site” indicates the 5′-most nucleoside of the target sequence to which the modified oligonucleotide is complementary. “Stop site” indicates the 3′-most nucleoside of the target sequence to which the modified oligonucleotide is complementary. As shown in the tables below, the modified oligonucleotides are complementary to SEQ ID NO: 1 (the complement of GENBANK Accession No. NT_011109.16 truncated from nucleotides 18539000 to 18566000) and/or SEQ ID NO: 2 (GENBANK Accession No. NM_004409.4). ‘N/A’ indicates that the modified oligonucleotide is not 100% complementary to that particular target sequence.

[0368] The modified oligonucleotides in the table below are 16 nucleosides in length. The sugar motif for the modified oligonucleotides in the table below are described in the column labeled “Sugar Motif (5′ to 3′),” wherein each “d” represents a 2′-β-D-deoxyribosyl sugar moiety, each “k” represents a cEt sugar moiety, each “e” represents a 2′-MOE sugar moiety, and each “y” represents a 2′-O-methylribosyl sugar moiety. The internucleoside linkage motif for the modified oligonucleotide is (from 5′ to 3′): sssssssssssssss; wherein each “s” represents a phosphorothioate internucleoside linkage. Each cytosine residue is a 5-methylcytosine unless otherwise indicated. Non-methylated cytosines are represented in bold underlined italicized font as “C”.

TABLE 33
Modified oligonucleotides with uniform phosphorothioate linkages complementary to human DMPK

| | | SEQ | SEQ | SEQ | SEQ | | |
|---|---|---|---|---|---|---|---|
| | | ID | ID | ID | ID | | |
| | | NO: 1 | NO: 1 | NO: 2 | NO: 2 | | SEQ |
| Compound | Nucleobase Sequence | Start | Stop | Start | Stop | Sugar Motif | ID |
| No. | (5′ to 3′) | Site | Site | Site | Site | (5′ to 3′) | NO |
| 570052 | CTTTTATTCGCGAGGG | 24775 | 24790 | 2833 | 2848 | kkkddddddddddkkk | 1335 |
| 1003033 | GTTATATGGCTGATTC | 19920 | 19935 | N/A | N/A | kkkddddddddddkkk | 1332 |
| 1338115 | GTTATATGGCTGATTC | 19920 | 19935 | N/A | N/A | kkkedddddddddkkk | 1332 |
| 1400737 | CGAAUGTCCGACAGTG | 19495 | 19510 | 1356 | 1371 | kkkdyddddddddkkk | 2297 |
| 1400739 | CGAATGTCCGACAGTG | 19495 | 19510 | 1356 | 1371 | kkeddddddddddkkk | 2298 |
| 1400742 | TTCCCGAATGTCCGAC | 19499 | 19514 | 1360 | 1375 | kkeddddddddddkkk | 2299 |
| 1400743 | TTCCCGAATGTCCGAC | 19499 | 19514 | 1360 | 1375 | kkkedddddddddkkk | 2299 |
| 1400744 | ACCTUCCCGAATGTCC | 19502 | 19517 | 1363 | 1378 | kkkdyddddddddkkk | 1334 |
| 1400748 | CACCUTCCCGAATGTC | 19503 | 19518 | 1364 | 1379 | kkkdyddddddddkkk | 2300 |
| 1400750 | CACCTTCCCGAATGTC | 19503 | 19518 | 1364 | 1379 | kkkedddddddddkkk | 2301 |
| 1400752 | GCACCTTCCCGAATGT | 19504 | 19519 | 1365 | 1380 | kkkdyddddddddkkk | 2302 |
| 1400755 | TGTAATGTTGTCCAGT | 21095 | 21110 | N/A | N/A | ekkddddddddddkke | 1342 |
| 1400760 | ATGTGTAATGTTGTCC | 21098 | 21113 | N/A | N/A | kkkdyddddddddkkk | 1333 |
| 1400761 | ATGTGTAATGTTGTCC | 21098 | 21113 | N/A | N/A | kkkedddddddddkkk | 1333 |
| 1400769 | GTTAUATGGCTGATTC | 19920 | 19935 | N/A | N/A | kkkdyddddddddkkk | 2303 |
| 1400772 | GTTATATGGCTGATTC | 19920 | 19935 | N/A | N/A | kkeddddddddddkkk | 1332 |
| 1400775 | CTTTUATTCGCGAGGG | 24775 | 24790 | 2833 | 2848 | kkkdyddddddddkkk | 2304 |
| 1400776 | CTTTTATTCGCGAGGG | 24775 | 24790 | 2833 | 2848 | kkeddddddddddkkk | 1335 |
| 1400777 | CTTTTATTCGCGAGGG | 24775 | 24790 | 2833 | 2848 | kkkedddddddddkkk | 1335 |
| 1400778 | GGAAUCTATCATGGCT | 20811 | 20826 | N/A | N/A | kkkdyddddddddkkk | 2305 |

[0369] The modified oligonucleotide in the table below is 16 nucleosides in length. The sugar motif for the modified oligonucleotide in the table below is described in the column labeled “Sugar Motif (5′ to 3′),” wherein each “d” represents a 2′-β-D-deoxyribosyl sugar moiety, and each “k” represents a cEt sugar moiety. The internucleoside linkage motif for the modified oligonucleotide is (from 5′ to 3′): ssssxssssssssss; wherein each “s” represents a phosphorothioate internucleoside linkage and each “x” represents a methoxypropyl phosphonate internucleoside linkage. Each cytosine residue is a 5-methylcytosine.

TABLE 34
3-10-3 cET modified oligonucleotides with mixed internucleoside linkages complementary
to human DMPK

| | | SEQ | SEQ | SEQ | SEQ | | |
|---|---|---|---|---|---|---|---|
| | | ID | ID | ID | ID | | |
| | | NO: 1 | NO: 1 | NO: 2 | NO: 2 | | SEQ |
| Compound | Nucleobase Sequence | Start | Stop | Start | Stop | Sugar Motif | ID |
| No. | (5′ to 3′) | Site | Site | Site | Site | (5′ to 3′) | NO |
| 1273313 | ATGTGTAATGTTGTCC | 21098 | 21113 | N/A | N/A | kkkddddddddddkkk | 1333 |

[0370] The modified oligonucleotides in the table below are 3-10-3 cEt modified oligonucleotides with uniform phosphorothioate backbone internucleoside linkages. The modified oligonucleotides are 16 nucleosides in length. The sugar motif for the modified oligonucleotides is (from 5′ to 3′): kkkddddddddddkkk; wherein each “d” represents a 2′-β-D-deoxyribosyl sugar moiety, and each “k” represents a cEt sugar moiety. The internucleoside linkage motif for the modified oligonucleotides is (from 5′ to 3′): sssssssssssssss; wherein each “s” represents a phosphorothioate internucleoside linkage. All cytosine nucleobases are 5-methylcytosines. Inosine nucleobases are represented by the letter “I” in the Nucleoside Sequence column in the table below. Further, the modified oligonucleotides in the table below are conjugated to a 6-palmitamidohexyl phosphate conjugate group attached to the 5′-OH of the oligonucleotide.

[0371] The structure for the conjugate group is:

[chemical structure]

TABLE 35
6-Palmitamidohexyl conjugated 3-10-3 cEt modified oligonucleotides with
uniform phosphorothioate internucleoside linkages complementary to human DMPK

| | | SEQ | SEQ | SEQ | SEQ | |
|---|---|---|---|---|---|---|
| | | ID | ID | ID | ID | |
| | | NO: 1 | NO: 1 | NO: 2 | NO: 2 | SEQ |
| Compound | Nucleobase Sequence | Start | Stop | Start | Stop | ID |
| No. | (5′ to 3′) | Site | Site | Site | Site | NO |
| 1046919 | CCCGAATGTCCGACAG | 19497 | 19512 | 1358 | 1373 | 2306 |
| 1046921 | GCACTTTGCGAACCAA | 24449 | 24464 | 2507 | 2522 | 2307 |
| 1046922 | TGCCCCGGGCACTCAG | 24078 | 24093 | 2136 | 2151 | 2308 |
| 1046924 | GAGTATACAGGCATGC | 17920 | 17935 | N/A | N/A | 2309 |
| 1046926 | GCAAATTTCCCGAGTA | 24525 | 24540 | 2583 | 2598 | 1414 |
| 1046933 | GAACTGGCAGGCGGTG | 24112 | 24127 | 2170 | 2185 | 2310 |
| 1046934 | ACCTGGCCCGTCTGCT | 15022 | 15037 | 477 | 492 | 2311 |
| 1046935 | AAAGCAAATTTCCCGA | 24528 | 24543 | 2586 | 2601 | 2312 |
| 1046936 | AGTCGGAGGACGAGGT | 24647 | 24662 | 2705 | 2720 | 2313 |
| 1046937 | CCTCTTAGGAGTCTTT | 19696 | 19711 | N/A | N/A | 2314 |
| 1059473 | AAATACCGAGGAATGT | 24725 | 24740 | 2783 | 2798 | 2315 |
| 1059474 | TAAATACCGAGGAATG | 24726 | 24741 | 2784 | 2799 | 2316 |
| 1059475 | ATAAATACCGAGGAAT | 24727 | 24742 | 2785 | 2800 | 2317 |
| 1059476 | AATAAATACCGAGGAA | 24728 | 24743 | 2786 | 2801 | 2318 |
| 1059477 | CAATAAATACCGAGGA | 24729 | 24744 | 2787 | 2802 | 2319 |
| 1059478 | GACAATAAATACCGAG | 24731 | 24746 | 2789 | 2804 | 2320 |
| 1059892 | ATAAGCAATGCATTAT | 20879 | 20894 | N/A | N/A | 2321 |
| 1059894 | TGATAAGCAATGCATT | 20881 | 20896 | N/A | N/A | 2322 |
| 1059903 | ATTTACTTGTGATAAG | 20890 | 20905 | N/A | N/A | 2323 |
| 1060860 | GTTATATGGCTGATTC | 19920 | 19935 | N/A | N/A | 1332 |
| 1060864 | ATGGTTACAAGATTCT | 19803 | 19818 | N/A | N/A | 1469 |
| 1060866 | CAAATTTTGTGCAGGT | 10409 | 10424 | N/A | N/A | 2046 |
| 1060867 | AGGTATAGTATGTGTA | 21107 | 21122 | N/A | N/A | 1880 |
| 1060869 | GGTTATGGCTAGGAGG | 10322 | 10337 | N/A | N/A | 1674 |
| 1060870 | CTTATTGTTATATGGC | 19926 | 19941 | N/A | N/A | 1619 |
| 1060872 | TGCTTTAGTCCTACCC | 14029 | 14044 | N/A | N/A | 2163 |
| 1060873 | GACAATCAGGCCTCTC | 14000 | 14015 | N/A | N/A | 1791 |
| 1060875 | TTCATTAATGATAAGG | 21120 | 21135 | N/A | N/A | 1510 |
| 1060876 | AATAGATTCTGGTTCG | 9241 | 9256 | V/A | N/A | 1896 |
| 1060877 | AAATTTTGTGCAGGTG | 10408 | 10423 | N/A | N/A | 1972 |
| 1060878 | AAGGTATAGTATGTGT | 21108 | 21123 | N/A | N/A | 1952 |
| 1060880 | ACAATAGCAAGGGCAG | 10685 | 10700 | N/A | N/A | 1757 |
| 1060882 | GACTCTACGATTCCAA | 9688 | 9703 | N/A | N/A | 2194 |
| 1060883 | GTTAATGGTTACAAGA | 19807 | 19822 | N/A | N/A | 1581 |
| 1060884 | AGACACTAAGATTTCC | 9058 | 9073 | N/A | N/A | 1895 |
| 1060886 | CCATAATTTAACACTC | 10714 | 10729 | V/A | N/A | 1905 |
| 1060887 | AGAGAAATGTTGCCCC | 12487 | 12502 | N/A | N/A | 1865 |
| 1060889 | GTTACAAGATTCTGGG | 19800 | 19815 | N/A | N/A | 2106 |
| 1060891 | AGTTAATGGTTACAAG | 19808 | 19823 | N/A | N/A | 1655 |
| 1060892 | TGTAAGTCTAGGTCAC | 17350 | 17365 | N/A | N/A | 1873 |
| 1060893 | ACAGTAAGGTTCCAAG | 19671 | 19686 | N/A | N/A | 1987 |
| 1060896 | AGTAGATGGGCACAGA | 17319 | 17334 | N/A | N/A | 2174 |
| 1060897 | TTAGACAAAGTAGCAT | 21047 | 21062 | N/A | N/A | 1494 |
| 1060898 | TCATTAATGATAAGGT | 21119 | 21134 | N/A | N/A | 1433 |
| 1060899 | GAGAATAGGTCCCAGA | 15578 | 15593 | N/A | N/A | 1786 |
| 1060900 | ATAAGGTATAGTATGT | 21110 | 21125 | N/A | N/A | 2030 |
| 1060901 | GTTACACGGTGAAGAG | 17565 | 17580 | N/A | N/A | 1874 |
| 1060903 | GCTTACATGTTCCCCC | 19409 | 19424 | N/A | N/A | 1356 |
| 1060904 | GCCTACTATGACCTTC | 9553 | 9568 | N/A | N/A | 2193 |
| 1060905 | AGAGAATAGGTCCCAG | 15579 | 15594 | N/A | N/A | 1651 |
| 1060906 | ATGATAAGGTATAGTA | 21113 | 21128 | N/A | N/A | 2110 |
| 1060908 | GAGATATCAACTTCCT | 20927 | 20942 | N/A | N/A | 2028 |
| 1060909 | TTCAATCAAGCGATTC | 18900 | 18915 | N/A | N/A | 1727 |
| 1060911 | CAGCGAGTCGGAGGAC | 24652 | 24667 | 2710 | 2725 | 2005 |
| 1060914 | AAGCAAATTTCCCGAG | 24527 | 24542 | 2585 | 2600 | 1856 |
| 1060915 | TGTTAGTCCACTCGCA | 23737 | 23752 | N/A | N/A | 2324 |
| 1060916 | GTCGAAGACAGTTCTA | 24042 | 24057 | 2100 | 2115 | 2325 |
| 1060917 | TAAATATCCAAACCGC | 24628 | 24643 | 2686 | 2701 | 2326 |
| 1060918 | GCAAAAGCAAATTTCC | 24531 | 24546 | 2589 | 2604 | 2327 |
| 1060921 | TATCTAAAGTGGCCCC | 19370 | 19385 | N/A | N/A | 2328 |
| 1060923 | CTTTTATTCGCGAGGG | 24775 | 24790 | 2833 | 2848 | 1335 |
| 1162627 | ATTCGCGAGGGTCGGG | 24770 | 24785 | 2828 | 2843 | 2329 |
| 1162628 | TATTCGCGAGGGTCGG | 24771 | 24786 | 2829 | 2844 | 2330 |
| 1162632 | CCTTTTATTCGCGAGG | 24776 | 24791 | 2834 | 2849 | 2331 |
| 1162633 | GCCTTTTATTCGCGAG | 24777 | 24792 | 2835 | 2850 | 2332 |
| 1162634 | GGCCTTTTATTCGCGA | 24778 | 24793 | 2836 | 2851 | 2333 |
| 1162635 | GGGCCTTTTATTCGCG | 24779 | 24794 | 2837 | 2852 | 2334 |
| 1162636 | AGGGCCTTTTATTCGC | 24780 | 24795 | 2838 | 2853 | 2158 |
| 1176162 | ATGTITAATGTTGTCC | 21098 | 21113 | N/A | N/A | 2157 |
| 1207018 | ATATGGCTGATTCAAA | 19917 | 19932 | N/A | N/A | 2153 |
| 1207019 | TATATGGCTGATTCAA | 19918 | 19933 | N/A | N/A | 1400 |
| 1207020 | TTATATGGCTGATTCA | 19919 | 19934 | N/A | N/A | 2085 |
| 1207021 | TGTTATATGGCTGATT | 19921 | 19936 | N/A | N/A | 2082 |
| 1207024 | TATTGTTATATGGCTG | 19924 | 19939 | N/A | N/A | 2079 |
| 1207025 | TTATTGTTATATGGCT | 19925 | 19940 | N/A | N/A | 2006 |

[0372] The modified oligonucleotides in the table below are 2-10-2 cEt modified oligonucleotides with uniform phosphorothioate backbone internucleoside linkages. The modified oligonucleotides are 14 nucleosides in length. The sugar motif for the modified oligonucleotides is (from 5′ to 3′): kkddddddddddkk; wherein each “d” represents a 2′-β-D-deoxyribosyl sugar moiety, and each “k” represents a cEt sugar moiety. The internucleoside linkage motif for the modified oligonucleotides is (from 5′ to 3′): sssssssssssss; wherein each “s” represents a phosphorothioate internucleoside linkage. All cytosine nucleobases are 5-methylcytosines. Further, the modified oligonucleotides in the table below are conjugated to a 6-palmitamidohexyl phosphate conjugate group (shown herein above) attached to the 5′-OH of the oligonucleotide.

TABLE 36
6-Palmitamidohexyl conjugated 2-10-2 cEt modified
oligonucleotides with uniform phosphorothioate internucleoside
linkages complementary to human DMPK

| | | SEQ | SEQ | |
|---|---|---|---|---|
| | | ID | ID | |
| | | NO: 1 | NO: 1 | SEQ |
| Compound | Nucleobase Sequence | Start | Stop | ID |
| No. | (5′ to 3′) | Site | Site | NO |
| 1059502 | GTAATGTTGTCCAG | 21096 | 21109 | 1935 |
| 1059503 | TGTAATGTTGTCCA | 21097 | 21110 | 1934 |
| 1059506 | ATGTGTAATGTTGT | 21100 | 21113 | 1932 |

[0373] The modified oligonucleotides in the table below are 3-10-3 cEt modified oligonucleotides with uniform phosphorothioate backbone internucleoside linkages. The modified oligonucleotides are 16 nucleosides in length. The sugar motif for the modified oligonucleotides is (from 5′ to 3′): kkkddddddddddkkk; wherein each “d” represents a 2′-β-D-deoxyribosyl sugar moiety, and each “k” represents a cEt sugar moiety. The internucleoside linkage motif for the modified oligonucleotides is (from 5′ to 3′): ssssxssssssssss; wherein each “s” represents a phosphorothioate internucleoside linkage, and each “x” represents a methoxypropyl phosphonate internucleoside linkage. All cytosine nucleobases are 5-methylcytosines. Further, the modified oligonucleotides in the table below are conjugated to a 6-palmitamidohexyl phosphate conjugate group (shown herein above) attached to the 5′-OH of the oligonucleotide.

TABLE 37
6-Palmitamidohexyl conjugated 3-10-3 cEt modified oligonucleotides with mixed
internucleoside linkages complementary to human DMPK

| | | SEQ | SEQ | SEQ | SEQ | |
|---|---|---|---|---|---|---|
| | | ID | ID | ID | ID | |
| | | NO: 1 | NO: 1 | NO: 2 | NO: 2 | SEQ |
| Compound | Nucleobase Sequence | Start | Stop | Start | Stop | ID |
| No. | (5′ to 3′) | Site | Site | Site | Site | NO |
| 1059887 | TGTAATGTTGTCCAGT | 21095 | 21110 | N/A | N/A | 1342 |
| 1059889 | ATGTGTAATGTTGTCC | 21098 | 21113 | N/A | N/A | 1333 |
| 1059890 | TATGTGTAATGTTGTC | 21099 | 21114 | N/A | N/A | 1930 |
| 1176128 | ATGTCCGACAGTGTCT | 19492 | 19507 | 1353 | 1368 | 1857 |
| 1176129 | AATGTCCGACAGTGTC | 19493 | 19508 | 1354 | 1369 | 1786 |
| 1176132 | CCGAATGTCCGACAGT | 19496 | 19511 | 1357 | 1372 | 1643 |
| 1176133 | CCCGAATGTCCGACAG | 19497 | 19512 | 1358 | 1373 | 2306 |
| 1176134 | TCCCGAATGTCCGACA | 19498 | 19513 | 1359 | 1374 | 1337 |
| 1176135 | TTCCCGAATGTCCGAC | 19499 | 19514 | 1360 | 1375 | 2299 |
| 1176138 | ACCTTCCCGAATGTCC | 19502 | 19517 | 1363 | 1378 | 1784 |
| 1176139 | CACCTTCCCGAATGTC | 19503 | 19518 | 1364 | 1379 | 2301 |
| 1176140 | GCACCTTCCCGAATGT | 19504 | 19519 | 1365 | 1380 | 2302 |
| 1176142 | AATGTTGTCCAGTAAT | 21092 | 21107 | N/A | N/A | 1783 |
| 1176143 | TAATGTTGTCCAGTAA | 21093 | 21108 | N/A | N/A | 1712 |
| 1176145 | GTATGTGTAATGTTGT | 21100 | 21115 | N/A | N/A | 1621 |
| 1184172 | GAATGTCCGACAGTGT | 19494 | 19509 | 1355 | 1370 | 1590 |
| 1213275 | TATGGCTGATTCAAAG | 19916 | 19931 | N/A | N/A | 1709 |
| 1213276 | ATGGCTGATTCAAAGA | 19915 | 19930 | N/A | N/A | 1639 |
| 1213282 | ATTGTTATATGGCTGA | 19923 | 19938 | N/A | N/A | 1638 |
| 1215869 | GTTATATGGCTGATTC | 19920 | 19935 | N/A | N/A | 1332 |
| 1215870 | TTGTTATATGGCTGAT | 19922 | 19937 | N/A | N/A | 1637 |
| 1241201 | CTTTTATTCGCGAGGG | 24775 | 24790 | 2833 | 2848 | 1335 |
| 1243719 | CGAATGTCCGACAGTG | 19495 | 19510 | 1356 | 1371 | 2298 |
| 1309459 | ACTTTGCGAACCAACG | 24447 | 24462 | 2505 | 2520 | 1563 |
| 1309468 | GGAATGTTAAACTGGG | 13962 | 13977 | N/A | N/A | 1520 |
| 1309469 | TCTTGTATCCTGTTGC | 17739 | 17754 | N/A | N/A | 1397 |
| 1309473 | TTGTATCCTGTTGCTT | 17737 | 17752 | N/A | N/A | 2210 |
| 1309475 | GGAATCTATCATGGCT | 20811 | 20826 | N/A | N/A | 1546 |
| 1309479 | AACATGTGTCAGTACA | 20981 | 20996 | N/A | N/A | 1842 |
| 1309482 | GGAGCGGTTGTGAACT | 24123 | 24138 | 2181 | 2196 | 2296 |
| 1309484 | GTTCTCTTAGACAAAG | 21053 | 21068 | N/A | N/A | 2275 |
| 1309485 | TCAGTAGTAGATGGGC | 17324 | 17339 | N/A | N/A | 1615 |

[0374] The modified oligonucleotides in the table below are 3-10-3 cEt modified oligonucleotides with mixed internucleoside linkages. The modified oligonucleotides in the table below are 16 nucleosides in length. The sugar motif for the modified oligonucleotides is (from 5′ to 3′): kkkddddddddddkkk; wherein each “d” represents a 2′-β-D-deoxyribosyl sugar moiety, and each “k” represents a cEt sugar moiety. The internucleoside linkage motifs for the modified oligonucleotides are presented in the column labeled “Internucleoside Linkages (5′ to 3′)” in the table below, wherein each “s” represents a phosphorothioate internucleoside linkage, each “o” represents a phosphodiester internucleoside linkage, and each “x” represents a methoxypropyl phosphonate internucleoside linkage. All cytosine nucleobases are 5-methylcytosines. Inosine nucleobases are represented by the letter “I” in the Nucleoside Sequence column in the table below. Further, the modified oligonucleotides in the table below are conjugated to a 6-palmitamidohexyl phosphate conjugate group (shown herein above) attached to the 5′-OH of the oligonucleotide.

TABLE 38
6-Palmitamidohexyl conjugated 3-10-3 cEt modified oligonucleotides with mixed internucleoside
linkages complementary to human DMPK

| | | SEQ | SEQ | SEQ | SEQ | | |
|---|---|---|---|---|---|---|---|
| | | ID | ID | ID | ID | | |
| | | NO: 1 | NO: 1 | NO: 2 | NO: 2 | Internucleoside | SEQ |
| Compound | Nucleobase Sequence | Start | Stop | Start | Stop | Linkages | ID |
| No. | (5′ to 3′) | Site | Site | Site | Site | (5′ to 3′) | NO |
| 1162310 | ACAATAAATACCGAGG | 24730 | 24745 | 2788 | 2803 | soossssssssssos | 1336 |
| 1162311 | ACAATAAATACCGAGG | 24730 | 24745 | 2788 | 2803 | sosssssssssssos | 1336 |
| 1162638 | TTCGCGAGGGTCGGGG | 24769 | 24784 | 2827 | 2842 | soossssssssssos | 1490 |
| 1162641 | TTATTCGCGAGGGTCG | 24772 | 24787 | 2830 | 2845 | soossssssssssos | 1859 |
| 1162643 | TTTTATTCGCGAGGGT | 24774 | 24789 | 2832 | 2847 | soossssssssssos | 1860 |
| 1162645 | CCTTTTATTCGCGAGG | 24776 | 24791 | 2834 | 2849 | soossssssssssos | 2331 |
| 1162647 | GGCCTTTTATTCGCGA | 24778 | 24793 | 2836 | 2851 | soossssssssssos | 2333 |
| 1162654 | TTATTCGCGAGGGTCG | 24772 | 24787 | 2830 | 2845 | sosssssssssssos | 1859 |
| 1162655 | TTTATTCGCGAGGGTC | 24773 | 24788 | 2831 | 2846 | sosssssssssssos | 1711 |
| 1162658 | CCTTTTATTCGCGAGG | 24776 | 24791 | 2834 | 2849 | sosssssssssssos | 2331 |
| 1176163 | ATGTITAATGTTGTCC | 21098 | 21113 | N/A | N/A | soossssssssssos | 2157 |
| 1176164 | ATGTGTAATGTTGTCC | 21098 | 21113 | N/A | N/A | soosxssssssssos | 1333 |
| 1213273 | TGGCTGATTCAAAGAA | 19914 | 19929 | N/A | N/A | ooooxoooooooooo | 1489 |
| 1309477 | AGGAACAAATCAGGAT | 22206 | 22221 | N/A | N/A | sssssxsssssssss | 1419 |

[0375] The modified oligonucleotides in the table below are 16 nucleosides in length. The sugar motif for the modified oligonucleotides is (from 5′ to 3′): eekkddddddddkkee; wherein each “d” represents a 2′-β-D-deoxyribosyl sugar moiety, each “e” represents a 2′-MOE sugar moiety, and each “k” represents a cEt sugar moiety. The internucleoside linkage motifs for the modified oligonucleotides are presented in the column labeled “Internucleoside Linkages (5′ to 3′)” in the table below, wherein each “s” represents a phosphorothioate internucleoside linkage, each “o” represents a phosphodiester internucleoside linkage, and each “x” represents a methoxypropyl phosphonate internucleoside linkage. All cytosine nucleobases are 5-methylcytosines. Further, the modified oligonucleotides in the table below are conjugated to a 6-palmitamidohexyl phosphate conjugate group (shown herein above) attached to the 5′-OH of the oligonucleotide.

TABLE 39
6-Palmitamidohexyl conjugated modified oligonucleotides with a mixed sugar motif and mixed
internucleoside linkages complementary to human DMPK

| | | SEQ | SEQ | SEQ | SEQ | | |
|---|---|---|---|---|---|---|---|
| | | ID | ID | ID | ID | | |
| | | NO: 1 | NO: 1 | NO: 2 | NO: 2 | Internucleoside | SEQ |
| Compound | Nucleobase Sequence | Start | Stop | Start | Stop | Linkages | ID |
| No. | (5′ to 3′) | Site | Site | Site | Site | (5′ to 3′) | NO |
| 1046939 | CCCGAATGTCCGACAG | 19497 | 19512 | 1358 | 1373 | sssssssssssssss | 2306 |
| 1176125 | TCCCGAATGTCCGACA | 19498 | 19513 | 1359 | 1374 | sssssxsssssssss | 1337 |
| 1176126 | CCCGAATGTCCGACAG | 19497 | 19512 | 1358 | 1373 | soossxsssssssos | 2306 |
| 1176127 | CCCGAATGTCCGACAG | 19497 | 19512 | 1358 | 1373 | sssssxsssssssss | 2306 |

[0376] The modified oligonucleotides in the table below are 16 nucleosides in length. The sugar motif for the modified oligonucleotides is (from 5′ to 3′): ekkddddddddddkke; wherein each “d” represents a 2′-β-D-deoxyribosyl sugar moiety, each “e” represents a 2′-MOE sugar moiety, and each “k” represents a cEt sugar moiety. The internucleoside linkage motif for the modified oligonucleotides is (from 5′ to 3′): sssssssssssssss; wherein each “s” represents a phosphorothioate internucleoside linkage. All cytosine nucleobases are 5-methylcytosines. Further, the modified oligonucleotides in the table below are conjugated to a 6-palmitamidohexyl phosphate conjugate group (shown herein above) attached to the 5′-OH of the oligonucleotide.

TABLE 40
6-Palmitamidohexyl conjugated modified oligonucleotides with a mixed sugar
motif and uniform phosphorothioate internucleoside linkages complementary
to human DMPK

| | | SEQ | SEQ | SEQ | SEQ | |
|---|---|---|---|---|---|---|
| | | ID | ID | ID | ID | |
| | | NO: 1 | NO: 1 | NO: 2 | NO: 2 | SEQ |
| Compound | Nucleobase Sequence | Start | Stop | Start | Stop | ID |
| No. | (5′ to 3′) | Site | Site | Site | Site | NO |
| 1046948 | TGTAATGTTGTCCAGT | 21095 | 21110 | N/A | N/A | 1342 |
| 1046952 | TATGTGTAATGTTGTC | 21099 | 21114 | N/A | N/A | 1930 |
| 1207072 | GTTATATGGCTGATTC | 19920 | 19935 | N/A | N/A | 1332 |
| 1207074 | TTGTTATATGGCTGAT | 19922 | 19937 | N/A | N/A | 1637 |
| 1207075 | ATTGTTATATGGCTGA | 19923 | 19938 | N/A | N/A | 1638 |
| 1240824 | CTTTTATTCGCGAGGG | 24775 | 24790 | 2833 | 2848 | 1335 |

[0377] The modified oligonucleotides in the table below are 16 nucleosides in length. The sugar motif for the modified oligonucleotides is (from 5′ to 3′): kkeddddddddddkkk; wherein each “d” represents a 2′-β-D-deoxyribosyl sugar moiety, each “e” represents a 2′-MOE sugar moiety, and each “k” represents a cEt sugar moiety. The internucleoside linkage motif for the modified oligonucleotides is (from 5′ to 3′): sssssssssssssss; wherein each “s” represents a phosphorothioate internucleoside linkage. All cytosine nucleobases are 5-methylcytosines. Further, the modified oligonucleotides in the table below are conjugated to a 6-palmitamidohexyl phosphate conjugate group (shown herein above) attached to the 5′-OH of the oligonucleotide.

TABLE 41
6-Palmitamidohexyl conjugated modified oligonucleotides with a mixed
sugar motif and uniform phosphorothioate internucleoside linkages
complementary to human DMPK

| | | SEQ | SEQ | SEQ | SEQ | |
|---|---|---|---|---|---|---|
| | | ID | ID | ID | ID | |
| | | NO: 1 | NO: 1 | NO: 2 | NO: 2 | SEQ |
| Compound | Nucleobase Sequence | Start | Stop | Start | Stop | ID |
| No. | (5′ to 3′) | Site | Site | Site | Site | NO |
| 1273292 | GTTATATGGCTGATTC | 19920 | 19935 | N/A | N/A | 1332 |
| 1370498 | AACATGTGTCAGTACA | 20981 | 20996 | N/A | N/A | 1842 |
| 1370504 | GGAGCGGTTGTGAACT | 24123 | 24138 | 2181 | 2196 | 2296 |
| 1370510 | TGTAATGTTGTCCAGT | 21095 | 21110 | N/A | N/A | 1342 |

[0378] The modified oligonucleotides in the table below are 16 nucleosides in length. The sugar motif for the modified oligonucleotides is (from 5′ to 3′): kkkdyddddddddkkk; wherein each “d” represents a 2′-β-D-deoxyribosyl sugar moiety, each “y” represents a 2′-O-methylribosyl sugar moiety, and each “k” represents a cEt sugar moiety. The internucleoside linkage motifs for the modified oligonucleotides are presented in the column labeled “Internucleoside Linkages (5′ to 3′)” in the table below, wherein each “s” represents a phosphorothioate internucleoside linkage, and each “o” represents a phosphodiester internucleoside linkage. All cytosine nucleobases are 5-methylcytosines. Further, the modified oligonucleotides in the table below are conjugated to a 6-palmitamidohexyl phosphate conjugate group (shown herein above) attached to the 5′-OH of the oligonucleotide.

TABLE 42
6-Palmitamidohexyl conjugated modified oligonucleotides with a mixed sugar
motif and mixed internucleoside linkages complementary to human DMPK

| | | SEQ | SEQ | | |
|---|---|---|---|---|---|
| | | ID | ID | | |
| | | NO: 1 | NO: 1 | Internucleoside | SEQ |
| Compound | Nucleobase Sequence | Start | Stop | Linkages | ID |
| No. | (5′ to 3′) | Site | Site | (5′ to 3′) | NO |
| 1064823 | ATGTGTAATGTTGTCC | 21098 | 21113 | sssssssssssssss | 1333 |
| 1064824 | TATGUGTAATGTTGTC | 21099 | 21114 | sssssssssssssss | 1488 |
| 1176165 | ATGTGTAATGTTGTCC | 21098 | 21113 | soossssssssssos | 1333 |
| 1273301 | GTTAUATGGCTGATTC | 19920 | 19935 | sssssssssssssss | 2303 |

[0379] The modified oligonucleotides in the table below are 16 nucleosides in length. The sugar motifs for the modified oligonucleotides in the table below are presented in the column labeled “Sugar Motif (5′ to 3′),” wherein each “d” represents a 2′-β-D-deoxyribosyl sugar moiety, each “e” represents a 2′-MOE sugar moiety, and each “k” represents a cEt sugar moiety. The internucleoside linkage motif for the modified oligonucleotides is (from 5′ to 3′): sssssssssssssss; wherein each “s” represents a phosphorothioate internucleoside linkage. All cytosine nucleobases are 5-methylcytosines. Further, the modified oligonucleotides in the table below are conjugated to a 6-palmitamidohexyl phosphate conjugate group (shown herein above) attached to the 5′-OH of the oligonucleotide.

TABLE 43
6-Palmitamidohexyl conjugated modified oligonucleotides with mixed sugar motifs and uniform
phosphorothioate internucleoside linkages complementary to human DMPK

| | | SEQ | SEQ | SEQ | SEQ | | |
|---|---|---|---|---|---|---|---|
| | | ID | ID | ID | ID | | |
| | | NO: 1 | NO: 1 | NO: 2 | NO: 2 | | SEQ |
| Compound | Nucleobase Sequence | Start | Stop | Start | Stop | Sugar Motif | ID |
| No. | (5′ to 3′) | Site | Site | Site | Site | (5′ to 3′) | NO |
| 1207130 | GTTATATGGCTGATTC | 19920 | 19935 | N/A | N/A | ekkkddddddddkkke | 1332 |
| 1240825 | CTTTTATTCGCGAGGG | 24775 | 24790 | 2833 | 2848 | ekkddddddddddkkk | 1335 |
| 1240826 | CTTTTATTCGCGAGGG | 24775 | 24790 | 2833 | 2848 | kkkddddddddddkke | 1335 |
| 1273291 | GTTATATGGCTGATTC | 19920 | 19935 | N/A | N/A | kekddddddddddkkk | 1332 |
| 1273297 | GTTATATGGCTGATTC | 19920 | 19935 | N/A | N/A | kkkedddddddddkkk | 1332 |
| 1370496 | TGTAATGTTGTCCAGT | 21095 | 21110 | N/A | N/A | kekddddddddddkkk | 1342 |
| 1370503 | GGAGCGGTTGTGAACT | 24123 | 24138 | 2181 | 2196 | kkkedddddddddkkk | 2296 |
| 1370505 | ATGTGTAATGTTGTCC | 21098 | 21113 | N/A | N/A | kkkedddddddddkkk | 1333 |
| 1370507 | GGAGCGGTTGTGAACT | 24123 | 24138 | 2181 | 2196 | kekddddddddddkkk | 2296 |

[0380] The modified oligonucleotides in the table below are 16 nucleosides in length. The sugar motifs for the modified oligonucleotides in the table below are presented in the column labeled “Sugar Motif (5′ to 3′),” wherein each “d” represents a 2′-β-D-deoxyribosyl sugar moiety, each “e” represents a 2′-MOE sugar moiety, each “k” represents a cEt sugar moiety, each “[5′-(S)-Me-d]” represents a 5′-(S)-methyl-β-D-2′-deoxyribosyl sugar moiety, each “[5′-(R)-Me-d]” represents a 5′-(R)-methyl-β-D-2′-deoxyribosyl sugar moiety, and each “[5′-(R)-allyl-d]” represents a 5′-(R)-allyl-β-D-2′-deoxyribosyl sugar moiety. The internucleoside linkage motif for the modified oligonucleotides is (from 5′ to 3′): sssssssssssssss; wherein each “s” represents a phosphorothioate internucleoside linkage. All cytosine nucleobases are 5-methylcytosines. Further, the modified oligonucleotides in the table below are conjugated to a 6-palmitamidohexyl phosphate conjugate group (shown herein above) attached to the 5′-OH of the oligonucleotide.

TABLE 44
6-Palmitamidohexyl conjugated modified oligonucleotides with uniform phosphorothioate
internucleoside linkages complementary to human DMPK

| | | SEQ | SEQ | | |
|---|---|---|---|---|---|
| | | ID | ID | | |
| | | NO: 1 | NO: 1 | | |
| Compound | Nucleobase Sequence | Start | Stop | | SEQ ID |
| No. | (5′ to 3′) | Site | Site | Sugar Motif (5′ to 3′) | NO |
| 1176148 | TGTAATGTTGTCCAGT | 21095 | 21110 | kkkdd[5′-(S)-Me-d]dddddddkkk | 1342 |
| 1176151 | TGTAATGTTGTCCAGT | 21095 | 21110 | kkkdd[5′-(R)-Me-d]dddddddkkk | 1342 |
| 1176153 | TGTAATGTTGTCCAGT | 21095 | 21110 | kkkdd[5′-(R)-allyl-d]dddddddkkk | 1342 |
| 1176157 | ATGTGTAATGTTGTCC | 21098 | 21113 | kkkdd[5′-(S)-Me-d]dddddddkkk | 1333 |
| 1176159 | ATGTGTAATGTTGTCC | 21098 | 21113 | kkkdd[5′-(R)-Me-d]dddddddkkk | 1333 |
| 1176160 | ATGTGTAATGTTGTCC | 21098 | 21113 | kkkddd[5′-(R)-Me-d]ddddddkkk | 1333 |
| 1176161 | ATGTGTAATGTTGTCC | 21098 | 21113 | kkkdd[5′-(R)-allyl-d]dddddddkkk | 1333 |

### Example 8: Tolerability of Modified Oligonucleotides Complementary to Human DMPK in Rats, 3-Hour Study

[0381] Modified oligonucleotides described herein above were tested in rats to assess the tolerability of the oligonucleotides. Sprague Dawley rats each received a single intrathecal (IT) dose of modified oligonucleotide at 3 mg. Each treatment group consisted of 3-4 rats. A group of 3-4 rats received PBS as a negative control. Each experiment is identified in separate tables below. At 3 hours post-injection, movement in 7 different parts of the body were evaluated for each rat. The 7 body parts are (1) the rat's tail; (2) the rat's posterior posture; (3) the rat's hind limbs; (4) the rat's hind paws; (5) the rat's forepaws; (6) the rat's anterior posture; (7) the rat's head. For each of the 7 different body parts, each rat was given a sub-score of 0 if the body part was moving or 1 if the body part was paralyzed (the functional observational battery score or FOB). After each of the 7 body parts were evaluated, the sub-scores were summed for each rat and then averaged for each group. For example, if a rat's tail, head, and all other evaluated body parts were moving 3 hours after the 3 mg IT dose, it would get a summed score of 0. If another rat was not moving its tail 3 hours after the 3 mg IT dose but all other evaluated body parts were moving, it would receive a score of 1. Results are presented as the average score for each treatment group.

TABLE 45
Tolerability scores in rats

| Compound | 3 hr. |
|---|---|
| No. | FOB |
| PBS | 0.00 |
| 1052866 | 2.50 |
| 1052867 | 1.75 |
| 1052869 | 2.75 |
| 1380456 | 4.75 |
| 1380987 | 1.50 |
| 1380993 | 4.00 |
| 1381037 | 3.00 |
| 1381255 | 0.00 |
| 1381275 | 2.50 |
| 1381363 | 1.00 |
| 1381456 | 0.00 |
| 1381470 | 0.50 |
| 1381668 | 0.50 |
| 1459314 | 4.25 |
| 1459315 | 3.25 |

TABLE 46
Tolerability scores in rats

| Compound | 3 hr. |
|---|---|
| No. | FOB |
| PBS | 0.25 |
| 1459320 | 2.50 |
| 1459322 | 5.00 |
| 1459323 | 1.75 |
| 1459324 | 3.00 |
| 1459325 | 1.75 |
| 1459326 | 2.75 |
| 1459327 | 0.75 |
| 1459328 | 1.50 |
| 1459329 | 3.25 |
| 1459330 | 3.00 |

TABLE 47
Tolerability scores in rats

| Compound | 3 hr. |
|---|---|
| No. | FOB |
| PBS | 0.00 |
| 1459343 | 1.25 |
| 1459344 | 0.75 |
| 1459345 | 3.00 |
| 1459346 | 2.25 |
| 1459348 | 0.25 |
| 1459349 | 0.00 |
| 1459351 | 3.00 |
| 1459352 | 0.00 |
| 1459353 | 0.00 |
| 1459354 | 0.00 |
| 1459355 | 3.00 |

TABLE 48
Tolerability scores in rats

| Compound No. | 3 hr. FOB |
|---|---|
| PBS | 0.00 |
| 1459356 | 2.00 |
| 1459359 | 0.00 |
| 1459360 | 0.67 |
| 1459364 | 0.00 |
| 1459365 | 1.33 |
| 1459366 | 2.00 |
| 1459367 | 0.00 |
| 1459368 | 1.33 |
| 1459369 | 0.00 |
| 1459372 | 0.00 |
| 1459373 | 3.00 |
| 1459374 | 1.33 |
| 1459375 | 2.00 |

TABLE 49
Tolerability scores in rats

| Compound No. | 3 hr. FOB |
|---|---|
| PBS | 0.00 |
| 1459377 | 2.00 |
| 1459378 | 2.00 |
| 1459379 | 1.67 |
| 1459383 | 0.00 |
| 1459386 | 3.00 |
| 1459387 | 2.33 |
| 1459392 | 1.67 |
| 1459393 | 2.00 |
| 1459394 | 2.00 |
| 1459395 | 0.00 |

TABLE 50
Tolerability scores in rats

| Compound No. | 3 hr. FOB |
|---|---|
| PBS | 0.00 |
| 1459396 | 0.00 |
| 1459398 | 0.00 |
| 1459399 | 0.00 |
| 1459400 | 2.67 |
| 1459401 | 3.00 |
| 1459402 | 3.00 |

TABLE 51
Tolerability scores in rats

| Compound No. | 3 hr. FOB |
|---|---|
| PBS | 0.00 |
| 1459406 | 1.67 |
| 1459407 | 0.00 |
| 1459408 | 0.67 |
| 1459409 | 1.67 |
| 1459412 | 0.67 |
| 1459413 | 3.00 |
| 1459415 | 1.33 |
| 1459417 | 2.33 |
| 1459418 | 0.67 |
| 1459419 | 0.33 |
| 1459420 | 0.67 |
| 1459421 | 2.00 |
| 1459422 | 0.33 |
| 1459423 | 0.67 |

‡ indicates that fewer than 3 samples were available

TABLE 52
Tolerability scores in rats

| Compound No. | 3 hr. FOB |
|---|---|
| PBS | 0.00 |
| 1459424 | 0.67 |
| 1459425 | 2.00 |
| 1459426 | 1.33 |
| 1459427 | 1.33 |
| 1459428 | 0.00 |
| 1459429 | 4.33‡ |
| 1459433 | 0.00 |
| 1459434 | 0.00 |
| 1459435 | 0.00 |
| 1459436 | 2.00 |
| 1459437 | 2.00 |
| 1459438 | 5.67‡ |
| 1459439 | 0.00 |

‡indicates that fewer than 3 samples were available

TABLE 53
Tolerability scores in rats

| Compound No. | 3 hr. FOB |
|---|---|
| PBS | 0.00 |
| 1459440 | 0.33 |
| 1459441 | 0.00 |
| 1459442 | 1.67 |
| 1459443 | 2.33 |
| 1459444 | 1.00 |
| 1459445 | 1.67 |
| 1459446 | 1.67 |
| 1459449 | 0.00 |
| 1459450 | 0.00 |
| 1459451 | 0.00 |
| 1459452 | 2.67 |
| 1459453 | 2.00 |
| 1459455 | 2.00 |
| 1459456 | 0.33 |
| 1459457 | 0.00 |
| 1459458 | 0.00 |
| 1459459 | 3.00 |

TABLE 54
Tolerability scores in rats

| Compound No. | 3 hr. FOB |
|---|---|
| PBS | 0.00 |
| 1459461 | 0.00 |
| 1459462 | 3.00 |
| 1459463 | 0.00 |
| 1459464 | 3.00 |
| 1459465 | 2.67 |
| 1459973 | 0.00 |
| 1459974 | 3.33 |
| 1459975 | 4.00 |
| 1459976 | 2.33 |
| 1459977 | 2.67 |
| 1459978 | 5.33 |
| 1459979 | 3.00 |
| 1459980 | 5.00 |
| 1459981 | 3.33 |
| 1459982 | 4.67 |
| 1459983 | 4.33 |
| 1459985 | 2.00 |

TABLE 55
Tolerability scores in rats

| Compound No. | 3 hr. FOB |
|---|---|
| PBS | 0.25 |
| 1459986 | 4.50‡ |
| 1459987 | 3.33 |
| 1459988 | 4.00‡ |
| 1459989 | 4.00‡ |
| 1459990 | 4.33 |
| 1460162 | 2.33 |
| 1460163 | 3.00 |
| 1460164 | 2.00 |
| 1460166 | 1.33 |
| 1460168 | 1.25 |
| 1460170 | 0.00 |
| 1460171 | 0.67 |
| 1460174 | 6.00 |
| 1460178 | 1.33 |

‡indicates that fewer than 3 samples were available

TABLE 56
Tolerability scores in rats

| Compound No. | 3 hr. FOB |
|---|---|
| PBS | 0.00 |
| 1380378 | 3.33 |
| 1380457 | 6.00 |
| 1380571 | 3.33 |
| 1380679 | 3.00 |
| 1380686 | 5.00‡ |
| 1380815 | 2.00 |
| 1380870 | 5.33 |
| 1380962 | 5.00 |
| 1381486 | 1.50 |
| 1381507 | 1.00 |
| 1381603 | 4.00 |
| 1381621 | 2.67 |
| 1460179 | 0.67 |
| 1460184 | 2.67 |
| 1460185 | 0.33 |

‡indicates that fewer than 3 samples were available

TABLE 57
Tolerability scores in rats

| Compound No. | 3 hr. FOB |
|---|---|
| 1052879 | 5.50‡ |
| 1380380 | 4.00 |
| 1380659 | 5.67 |
| 1381513 | 1.33 |
| 1459991 | 4.00 |

‡indicates that fewer than 3 samples were available

TABLE 58
Tolerability scores in rats

| Compound No. | 3 hr. FOB |
|---|---|
| PBS | 0.00 |
| 1052868 | 2.00‡ |
| 1052877 | 5.00‡ |
| 1380469 | 3.00 |
| 1380652 | 1.00 |
| 1380821 | 3.00 |
| 1380847 | 3.67 |
| 1380868 | 3.00 |
| 1381223 | 3.00 |
| 1381285 | 0.00 |
| 1381524 | 3.00 |
| 1381657 | 1.00 |
| 1381677 | 0.00 |

‡indicates that fewer than 3 samples were available

TABLE 59
Tolerability scores in rats

| Compound No. | 3 hr. FOB |
|---|---|
| PBS | 0.25 |
| 1052877 | 3.25 |
| 1380679 | 4.25 |
| 1381668 | 1.50 |
| 1459328 | 1.25 |
| 1459329 | 1.75 |
| 1459374 | 0.50 |
| 1459375 | 0.25 |
| 1459442 | 2.50 |
| 1459443 | 2.25 |
| 1511084 | 1.25 |

### Example 9: Tolerability of Modified Oligonucleotides Complementary to Human DMPK in Wild-Type Mice, 3-Hour Study

[0382] Modified oligonucleotides described herein above were tested in wild-type female C57/B16 mice to assess the tolerability of the oligonucleotides. Wild-type female C57/B16 mice each received a single ICV dose of modified oligonucleotide at 350, 500 or 700 μg indicated in the tables below. Each treatment group consisted of 2-4 mice. A group of 3-4 mice received PBS as a negative control for each experiment. Each experiment is identified in separate tables below. At 3 hours post-injection, mice were evaluated according to seven different criteria. The criteria are (1) the mouse was bright, alert, and responsive; (2) the mouse was standing or hunched without stimuli; (3) the mouse showed any movement without stimuli; (4) the mouse demonstrated forward movement after it was lifted; (5) the mouse demonstrated any movement after it was lifted; (6) the mouse responded to tail pinching; (7) regular breathing. For each of the 7 criteria, a mouse was given a subscore of 0 if it met the criteria and 1 if it did not (the functional observational battery score or FOB). After all 7 criteria were evaluated, the scores were summed for each mouse and averaged within each treatment group. The results are presented in the tables below.

TABLE 60
Tolerability scores in mice at a dose of 500 μg

| Compound No. | 3 hr. FOB |
|---|---|
| PBS | 0.00 |
| 1052863 | 2.50 |
| 1052864 | 4.00 |
| 1052865 | 2.50 |
| 1052866 | 5.50 |
| 1052867 | 2.00 |
| 1052868 | 5.00 |
| 1052869 | 4.50 |
| 1052870 | 4.25 |
| 1052871 | 4.00 |
| 1052873 | 4.00 |
| 1052874 | 6.00 |
| 1052875 | 2.75 |
| 1052876 | 5.50 |
| 1052877 | 5.50 |
| 1052879 | 5.75 |
| 1052881 | 5.25 |
| 1052883 | 6.00 |
| 1052886 | 5.75 |
| 1052887 | 6.00 |
| 1052889 | 5.25 |

TABLE 61
Tolerability scores in mice at a dose of 700 μg

| Compound No. | 3 hr. FOB |
|---|---|
| PBS | 0.00 |
| 1052866 | 1.33 |
| 1052867 | 6.00 |
| 1052869 | 2.00 |
| 1380456 | 3.00 |
| 1380987 | 1.00 |
| 1380993 | 3.00 |
| 1381037 | 2.33 |
| 1381255 | 1.00 |
| 1381363 | 0.67 |
| 1381456 | 0.00 |
| 1381470 | 0.00 |
| 1381668 | 0.00 |
| 1459314 | 5.33 |
| 1459315 | 4.00 |
| 1459320 | 2.00 |
| 1459322 | 3.67 |
| 1459323 | 1.67 |
| 1459324 | 3.33 |
| 1459325 | 2.00 |
| 1459326 | 2.00 |
| 1459327 | 1.33 |
| 1459328 | 1.33 |
| 1459329 | 2.33 |
| 1459330 | 2.00 |
| 1459343 | 1.67 |
| 1459344 | 0.33 |
| 1459345 | 2.33 |
| 1459346 | 2.00 |
| 1459348 | 0.00 |
| 1459349 | 0.67 |
| 1459351 | 4.67 |
| 1459352 | 0.33 |
| 1459353 | 1.00 |
| 1459354 | 0.00 |
| 1459355 | 3.00 |
| 1459356 | 2.00 |
| 1459359 | 2.00 |
| 1459360 | 0.67 |

TABLE 62
Tolerability scores in mice at a dose of 700 μg

| Compound No. | 3 hr. FOB |
|---|---|
| PBS | 0.00 |
| 1459364 | 0.33 |
| 1459365 | 1.00 |
| 1459366 | 1.00 |
| 1459367 | 1.00 |
| 1459368 | 1.00 |
| 1459369 | 1.00 |
| 1459372 | 3.00 |
| 1459373 | 3.33 |
| 1459374 | 2.00 |
| 1459375 | 1.00 |
| 1459377 | 5.00 |
| 1459378 | 3.67 |
| 1459379 | 1.33 |
| 1459383 | 0.67 |
| 1459386 | 3.33 |
| 1459387 | 1.67 |
| 1459392 | 0.33 |
| 1459393 | 0.00 |
| 1459394 | 2.00 |

TABLE 63
Tolerability scores in mice at a dose of 700 μg

| Compound | |
|---|---|
| No. | 3 hr. FOB |
| PBS | 0.00 |
| 1459419 | 0.00 |
| 1459420 | 0.33 |
| 1459421 | 0.00 |
| 1459422 | 0.33 |
| 1459423 | 0.00 |
| 1459424 | 0.00 |
| 1459425 | 3.00 |
| 1459426 | 1.00 |
| 1459427 | 0.00 |
| 1459428 | 0.00 |
| 1459429 | 2.00 |
| 1459433 | 0.67 |
| 1459434 | 0.00 |
| 1459435 | 1.00 |
| 1459436 | 2.33 |
| 1459437 | 1.00 |
| 1459438 | 4.00 |
| 1459439 | 0.00 |
| 1459440 | 0.00 |
| 1459441 | 0.00 |
| 1459442 | 3.00 |
| 1459443 | 2.00 |
| 1459444 | 1.00 |
| 1459445 | 0.67 |
| 1459446 | 2.33 |
| 1459449 | 0.67 |
| 1459450 | 0.33 |
| 1459451 | 0.33 |
| 1459452 | 2.33 |
| 1459453 | 1.33 |
| 1459455 | 3.00 |
| 1459456 | 0.00 |
| 1459457 | 0.00 |
| 1459458 | 1.00 |
| 1459459 | 2.67 |
| 1459461 | 1.00 |
| 1459462 | 2.33 |
| 1459463 | 1.00 |
| 1459464 | 2.00 |

TABLE 64
Tolerability scores in mice at a dose of 700 μg

| Compound | |
|---|---|
| No. | 3 hr. FOB |
| PBS | 0.00 |
| 1380378 | 4.00 |
| 1380457 | 5.00 |
| 1380571 | 5.00 |
| 1380679 | 3.33 |
| 1380686 | 5.00 |
| 1380815 | 0.00 |
| 1380870 | 5.00 |
| 1380962 | 4.00 |
| 1381486 | 3.00 |
| 1381507 | 0.00 |
| 1381603 | 2.00 |
| 1381621 | 1.00 |
| 1459465 | 3.67 |
| 1459973 | 0.00 |
| 1459974 | 4.00 |
| 1459975 | 2.67 |
| 1459976 | 1.67 |
| 1459977 | 1.33 |
| 1459978 | 4.00 |
| 1459979 | 4.00 |
| 1459980 | 5.00 |
| 1459981 | 5.33 |
| 1459982 | 3.67 |
| 1459983 | 3.67 |
| 1459985 | 2.00 |
| 1459986 | 4.33 |
| 1459987 | 2.67 |
| 1459988 | 4.00 |
| 1459989 | 3.33 |
| 1459990 | 4.00 |
| 1459991 | 5.00 |
| 1460162 | 3.00 |
| 1460163 | 1.33 |
| 1460164 | 1.00 |
| 1460166 | 0.33 |
| 1460168 | 1.33 |
| 1460170 | 0.00 |
| 1460171 | 0.00 |
| 1460174 | 5.00 |
| 1460178 | 0.67 |
| 1460179 | 1.00 |
| 1460184 | 1.00 |
| 1460185 | 0.00 |

TABLE 65
Tolerability scores in mice at a dose of 700 μg

| Compound | |
|---|---|
| No. | 3 hr. FOB |
| PBS | 0.00 |
| 1052868 | 2.00 |
| 1052879 | 5.33 |
| 1380380 | 1.67 |
| 1380469 | 5.33 |
| 1380652 | 0.00 |
| 1380659 | 4.67 |
| 1380821 | 1.67 |
| 1380847 | 3.00 |
| 1380868 | 1.00 |
| 1381223 | 2.33 |
| 1381285 | 0.33 |
| 1381513 | 0.00 |
| 1381524 | 2.00 |
| 1381657 | 1.00 |
| 1381677 | 1.00 |
| 1459395 | 1.00 |
| 1459396 | 1.00 |
| 1459398 | 0.00 |
| 1459399 | 0.00 |
| 1459400 | 2.00 |
| 1459401 | 1.00 |
| 1459402 | 1.00 |
| 1459406 | 1.00 |
| 1459407 | 1.00 |
| 1459408 | 0.67 |
| 1459409 | 1.00 |
| 1459412 | 1.33 |
| 1459413 | 1.00 |
| 1459415 | 1.00 |
| 1459417 | 1.00 |
| 1459418 | 1.00 |

TABLE 66
Tolerability scores in mice at a dose of 700 μg

| Compound | |
|---|---|
| No. | 3 hr. FOB |
| PBS | 0.00‡ |
| 1052877 | 5.67 |

‡indicates that fewer than 3 samples were available

TABLE 67
Tolerability scores in mice at a dose of 700 μg

| Compound | 3 hr. |
|---|---|
| No. | FOB |
| PBS | 0.00 |
| 1052877 | 5.75 |
| 1380679 | 3.50 |
| 1381668 | 0.00 |
| 1459328 | 0.00 |
| 1459329 | 2.50 |
| 1459374 | 0.75 |
| 1459375 | 1.00 |
| 1459442 | 3.25 |
| 1459443 | 2.25 |
| 1511084 | 0.75 |

TABLE 68
Tolerability scores in mice at a dose of 350 μg

| Compound | |
|---|---|
| No. | 3 hr. FOB |
| PBS | 0.00 |
| 1511076 | 3.00 |
| 1511078 | 6.00 |
| 1511079 | 0.00 |
| 1511080 | 1.00 |
| 1511081 | 0.00 |
| 1511082 | 0.00 |
| 1511083 | 0.50 |
| 1511084 | 0.50 |
| 1511085 | 0.00 |
| 1511086 | 0.50 |
| 1511087 | 0.50 |
| 1511088 | 0.00 |
| 1511089 | 0.00 |
| 1511090 | 6.00 |
| 1511091 | 1.00 |
| 1511092 | 0.00 |
| 1511093 | 0.00 |
| 1511094 | 0.00 |
| 1511095 | 1.00 |
| 1511096 | 0.00 |
| 1511097 | 0.50 |
| 1511098 | 0.00 |
| 1511099 | 0.50 |
| 1511100 | 0.50 |
| 1511101 | 0.50 |
| 1511102 | 0.00 |
| 1511103 | 0.00 |
| 1511104 | 0.00 |
| 1511105 | 1.00 |
| 1511106 | 1.00 |
| 1511107 | 2.00 |
| 1380987 | 1.50 |
| 1459415 | 0.50 |
| 1459980 | 3.50 |
| 1459373 | 1.00 |
| 1459973 | 0.00 |

### Example 10: Tolerability of Modified Oligonucleotides Complementary to Human DMPK in Wild-Type Mice, 3-Hour Study

[0383] The modified oligonucleotide described herein above was tested in wild-type female C57/B16 mice to assess the tolerability of the oligonucleotide. Wild-type female C57/B16 mice each received a single ICV dose of modified oligonucleotide at various doses as indicated in the tables below. Each treatment group consisted of 4 mice. A group of 4 mice received PBS as a negative control. At 3 hours post-injection, mice were evaluated according to seven different criteria. The criteria are (1) the mouse was bright, alert, and responsive; (2) the mouse was standing or hunched without stimuli; (3) the mouse showed any movement without stimuli; (4) the mouse demonstrated forward movement after it was lifted; (5) the mouse demonstrated any movement after it was lifted; (6) the mouse responded to tail pinching; (7) regular breathing. For each of the 7 criteria, a mouse was given a subscore of 0 if it met the criteria and 1 if it did not (the functional observational battery score or FOB). After all 7 criteria were evaluated, the scores were summed for each mouse and averaged within each treatment group. The results are presented in the table below.

[0384] Compound No. 486178 is described herein above.

TABLE 69
Tolerability scores in mice

| Compound | | |
|---|---|---|
| No. | Dose (μg) | 3 hr. FOB |
| PBS | N/A | 0.00 |
| 486178 | 10 | 0.00 |
| | 50 | 3.00 |
| | 100 | 4.75 |

TABLE 70
Tolerability scores in mice

| Compound | | |
|---|---|---|
| No. | Dose (μg) | 3 hr. FOB |
| PBS | N/A | 0.00 |
| 1338115 | 100 | 5.75 |
| | 200 | 6.75 |
| 1400761 | 100 | 5.50 |

### Example 11: Activity of Modified Oligonucleotides Complementary to Human DMPK in DMSXL Transgenic Mice

[0385] Modified oligonucleotides described above were tested in DMSXL transgenic mice previously described in Huguet A, et. al, Molecular, Physiological, and Motor Performance Defects in DMSXL Mice Carrying >1,000 CTG Repeats from the Human DM1 Locus; PLOS Genetics, 2012, vol. 8, no. 11: e1003043.

### Treatment

[0386] DMSXL transgenic mice were divided into groups of 1-2 mice each. The number of animals treated in each group is indicated in the tables below in the column labeled “n”. Each mouse received a single ICV bolus of 100 or 350 μg of modified oligonucleotide as indicated in the tables below. A group of 2-4 mice received PBS as a negative control.

### RNA Analysis

[0387] Two weeks post treatment, mice were sacrificed, and RNA was extracted from cortical brain tissue, spinal cord, and hippocampus for RTPCR analysis to measure amount of DMPK RNA using human primer probe set RTS38096 (forward nucleobase sequence TTTACACCGGATTTCGAAGGT, designated herein as SEQ ID NO: 9; reverse nucleobase sequence CGAATGTCCGACAGTGTCTC, designated herein as SEQ ID NO: 10; probe nucleobase sequence TCCTCCACCAAGTCGAAGTTGCAT, designated herein as SEQ ID NO: 11). Results are presented as percent human DMPK RNA relative to PBS control, normalized to mouse GAPDH (% control). Mouse GAPDH was amplified using mouse primer probe set mGapdh_LTS00102 (forward nucleobase sequence GGCAAATTCAACGGCACAGT, designated herein as SEQ ID NO: 12; reverse nucleobase sequence GGGTCTCGCTCCTGGAAGAT, designated herein as SEQ ID NO: 13; probe nucleobase sequence AAGGCCGAGAATGGGAAGCTTGTCATC, designated herein as SEQ TD NO: 14). The values marked by the symbol “†” indicate that the modified oligonucleotide is complementary to the amplicon region of the primer probe set. In such cases, an additional human primer probe set, RTS38095 (described herein above) was run to confirm activity of the compounds.

TABLE 71
Reduction of human DMPK RNA in DMSXL
transgenic mice at a dose of 350 μg

| | | DMPK RNA (% control) | | |
|---|---|---|---|---|
| | | SPINAL | | |
| Compound | | CORD | CORTEX | HIPPOCAMPUS |
| No. | n | (RTS38096) | (RTS38096) | (RTS38096) |
| PBS | 4 | 100 | 100 | 100 |
| 1052879 | 2 | 31 | 32 | 41 |
| 1052881 | 1 | 61 | 86 | 87 |
| 1380286 | 1 | 53 | 66 | 63 |
| 1380289 | 2 | 53 | 49 | 57 |
| 1380294 | 2 | 63 | 76 | 95 |
| 1380304 | 1 | 90 | 103 | 96 |
| 1380320 | 1 | 45 | 68 | 65 |
| 1380322 | 1 | 54 | 67 | 80 |
| 1380329 | 2 | 77 | 68 | 75 |
| 1380330 | 2 | 96 | 70 | 67 |
| 1380345 | 2 | 59 | 57 | 57 |
| 1380355 | 1 | 74 | 84 | 92 |
| 1380358 | 2 | 68‡ | 68‡ | 90‡ |
| 1380380 | 1 | 32 | 41 | 33 |
| 1380405 | 1 | 78 | 51 | 48 |
| 1380431 | 2 | 66 | 63 | 62 |
| 1380432 | 1 | 41 | 60 | 59 |
| 1380446 | 2 | 75 | 51 | 56 |
| 1380447 | 1 | 44 | 57 | 49 |
| 1380453 | 2 | 73 | 63 | 66 |
| 1380454 | 2 | 68 | 70 | 78 |
| 1380460 | 1 | 49 | 64 | 78 |
| 1380469 | 1 | 44 | 39 | 43 |
| 1380489 | 2 | 38 | 41 | 47 |
| 1380502 | 1 | 79 | 75 | 78 |
| 1380516 | 2 | 79 | 74 | 76 |
| 1380517 | 2 | 58 | 54 | 57 |
| 1380522 | 1 | 52 | 66 | 75 |
| 1380539 | 1 | 62 | 65 | 86 |
| 1380545 | 1 | 70 | 77 | 98 |
| 1380550 | 1 | 31 | 46 | 44 |
| 1380564 | 1 | 55 | 68 | 70 |
| 1380574 | 1 | 77 | 83 | 82 |
| 1380598 | 2 | 56 | 59 | 53 |
| 1380605 | 2 | 64 | 81 | 88 |
| 1380630 | 1 | 55 | 44 | 41 |
| 1380634 | 2 | 43 | 50 | 53 |
| 1380647 | 1 | 50 | 40 | 51 |
| 1380652 | 2 | 35 | 39 | 33 |
| 1380656 | 1 | 70 | 70 | 82 |
| 1380659 | 2 | 37 | 30 | 35 |
| 1380665 | 2 | 79 | 76 | 77 |
| 1380668 | 2 | 72 | 66 | 61 |
| 1380679 | 2 | 39 | 27 | 46 |
| 1380683 | 2 | 40 | 41 | 51 |
| 1380684 | 1 | 56 | 46 | 50 |
| 1380686 | 2 | 36 | 34 | 30 |
| 1380693 | 2 | 47 | 59 | 64 |
| 1380700 | 1 | 86 | 78 | 89 |
| 1380701 | 2 | 51 | 55 | 61 |
| 1380721 | 1 | 84 | 62 | 63 |
| 1380725 | 2 | 33 | 46 | 49 |
| 1380740 | 1 | 50 | 44 | 58 |
| 1380765 | 2 | 54 | 55 | 79 |
| 1380777 | 2 | 65 | 68 | 81 |
| 1380778 | 2 | 65 | 59 | 62 |
| 1380782 | 1 | 56 | 54 | 62 |
| 1380785 | 2 | 65 | 56 | 57 |
| 1380791 | 1 | 47 | 63 | 69 |
| 1380798 | 1 | 68 | 71 | 83 |
| 1380821 | 1 | 29 | 37 | 51 |
| 1380828 | 2 | 54 | 50 | 75 |
| 1380835 | 2 | 98 | 88 | 105 |
| 1380847 | 1 | 46 | 36 | 39 |
| 1380857 | 1 | 44 | 61 | 73 |
| 1380862 | 1 | 32 | 47 | 64 |
| 1380864 | 1 | 102 | 104 | 99 |
| 1380868 | 2 | 40 | 38 | 51 |
| 1380870 | 1 | 67 | 63 | 76 |
| 1380872 | 1 | 46 | 58 | 65 |
| 1380892 | 2 | 61 | 49 | 74 |
| 1380995 | 2 | 76 | 66 | 64 |
| 1380905 | 1 | 61 | 64 | 89 |
| 1380975 | 1 | 83 | 94 | 88 |
| 1381015 | 2 | 89 | 90 | 75 |
| 1381021 | 1 | 60 | 56 | 62 |
| 1381059 | 2 | 72 | 75 | 75 |
| 1381061 | 1 | 32 | 50 | 44 |
| 1381062 | 2 | 56 | 44 | 55 |
| 1381079 | 1 | 57 | 61 | 75 |
| 1381083 | 2 | 78 | 79 | 77 |
| 1381132 | 1 | 47 | 51 | 83 |
| 1381153 | 1 | 67 | 49 | 67 |
| 1381156 | 1 | 83 | 78 | 95 |
| 1381159 | 2 | 40 | 50 | 61 |
| 1381170 | 1 | 63 | 48 | 60 |
| 1381176 | 2 | 45 | 46 | 55 |
| 1381178 | 1 | 59 | 56 | 78 |
| 1381183 | 1 | 64 | 58 | 63 |
| 1381200 | 1 | 34 | 47 | 57 |
| 1381203 | 1 | 70 | 76 | 78 |
| 1381214 | 1 | 46 | 52 | 60 |
| 1381215 | 2 | 74 | 61 | 57 |
| 1381217 | 2 | 72 | 66 | 70 |
| 1381223 | 1 | 36 | 40 | 39 |
| 1381285 | 2 | 36 | 39 | 45 |
| 1381320 | 1 | 45 | 45 | 39 |
| 1381332 | 2 | 54 | 53 | 53 |
| 1381407 | 1 | 38 | 61 | 48 |
| 1381435 | 1 | 61 | 64 | 65 |
| 1381456 | 2 | 32 | 29 | 24 |
| 1381490 | 2 | 61 | 68 | 60 |
| 1381507 | 2 | 29 | 43 | 30 |
| 1381513 | 2 | 27 | 39 | 36 |
| 1381524 | 1 | 32 | 38 | 39 |
| 1381554 | 2 | 53 | 48 | 34 |
| 1381603 | 2 | 34 | 47 | 39 |
| 1381614 | 2 | 70 | 74 | 63 |
| 1381619 | 2 | 61 | 64 | 71 |
| 1381657 | 1 | 25 | 39 | 33 |
| 1381668 | 2 | 34 | 28 | 28 |
| 1381671 | 2 | 45 | 52 | 49 |
| 1381677 | 1 | 30 | 34 | 43 |
| 1382666 | 2 | 86 | 75 | 81 |
| 1382683 | 2 | 101 | 74 | 80 |
| 1382684 | 2 | 88 | 93 | 101 |
| 1382695 | 2 | 80 | 66 | 62 |
| 1382701 | 2 | 68 | 62 | 60 |
| 1382703 | 2 | 98 | 82 | 78 |
| 1382715 | 2 | 99 | 92 | 97 |
| 1382732 | 2 | 95 | 85 | 83 |
| 1382734 | 1 | 94 | 111 | 99 |
| 1382741 | 2 | 91 | 87 | 83 |
| 1382751 | 2 | 94 | 86 | 75 |
| 1382753 | 2 | 88 | 78 | 76 |
| 1382755 | 1 | 79 | 76 | 73 |
| 1382760 | 2 | 87 | 81 | 85 |

‡Indicates that fewer than 2 samples were available for analysis

TABLE 72
Reduction of human DMPK RNA in
DMSXL transgenic mice at a dose of 350 μg

| | | DMPK RNA (% control) | | |
|---|---|---|---|---|
| | | SPINAL | | |
| Compound | | CORD | CORTEX | HIPPOCAMPUS |
| No. | n | (RTS38096) | (RTS38096) | (RTS38096) |
| PBS | 4 | 100 | 100 | 100 |
| 1380496 | 1 | 67 | 64 | 84 |
| 1380586 | 2 | 81 | 87 | 84 |
| 1382761 | 1 | 96 | 81 | 92 |

TABLE 73
Reduction of human DMPK RNA in DMSXL transgenic
mice at a dose of 100 or 350 μg

| | | | DMPK RNA (% control) | | | |
|---|---|---|---|---|---|---|
| Compound | Dose | | CORTEX | | SPINAL CORD | |
| No. | (ug) | n | RTS38096 | RTS38095 | RTS38096 | RTS38095 |
| PBS | N/A | 4 | 100 | 100 | 100 | 100 |
| 1381255 | 350 | 2 | 54 | 64 | 40 | 56 |
| 1381470 | 350 | 2 | 36 | 41 | 30 | 40 |
| 1381486 | 350 | 2 | 53 | 64 | 48 | 58 |
| 1459325 | 350 | 2 | 52 | 76 | 65 | 88 |
| 1459327 | 350 | 2 | 33‡ | 39‡ | 46‡ | 54‡ |
| 1459343 | 350 | 2 | 31 | 31 | 38 | 40 |
| 1459344 | 350 | 2 | 48 | 54 | 63 | 76 |
| 1459348 | 350 | 2 | 74 | 84 | 87 | 113 |
| 1459349 | 350 | 2 | 57 | 72 | 58 | 80 |
| 1459352 | 350 | 2 | 43 | 49 | 32 | 48 |
| 1459353 | 350 | 2 | 33 | 37 | 32 | 52 |
| 1459354 | 350 | 2 | 37 | 44 | 21 | 31 |
| 1459359 | 350 | 2 | 63 | 77 | 45 | 69 |
| 1459360 | 350 | 2 | 37 | 39 | 29 | 42 |
| 1459364 | 350 | 2 | 59 | 64 | 26 | 39 |
| 1459367 | 350 | 2 | 92 | 110 | 84 | 108 |
| 1459369 | 350 | 2 | 74 | 78 | 64 | 84 |
| 1459372 | 350 | 2 | 35 | 36 | 23 | 34 |
| 1459374 | 350 | 2 | 18 | 20 | 20 | 25 |
| 1459377 | 350 | 2 | 51 | 66 | 58 | 71 |
| 1459378 | 350 | 2 | 65 | 78 | 84 | 103 |
| 1459379 | 350 | 2 | 67 | 83 | 90 | 105 |
| 1459383 | 350 | 2 | 72 | 87 | 56 | 61 |
| 1459395 | 350 | 2 | 68‡ | 71‡ | 74‡ | 77‡ |
| 1459396 | 350 | 2 | 89‡ | 106‡ | 70‡ | 88‡ |
| 1459398 | 350 | 2 | 57 | 63 | 32 | 40 |
| 1459399 | 350 | 2 | 45 | 52 | 25 | 35 |
| 1459407 | 350 | 2 | 48 | 55 | 44 | 49 |
| 1459408 | 350 | 2 | 47 | 53 | 58 | 80 |
| 1459409 | 350 | 2 | 36 | 44 | 33 | 38 |
| 1459412 | 350 | 2 | 67 | 74 | 60 | 93 |
| 1459418 | 350 | 2 | 33 | 40 | 33 | 41 |
| 1459419 | 350 | 2 | 26 | 37 | 29 | 36 |
| 1459420 | 350 | 2 | 35 | 39 | 36 | 48 |
| 1459422 | 350 | 2 | 65 | 72 | 76 | 90 |
| 1459423 | 350 | 2 | 76 | 82 | 99 | 116 |
| 1459424 | 350 | 2 | 51 | 57 | 73 | 71 |
| 1459426 | 350 | 2 | 31 | 36 | 46 | 46 |
| 1459427 | 350 | 2 | 45 | 51 | 60 | 65 |
| 1459428 | 350 | 2 | 67 | 82 | 71 | 110 |
| 1459433 | 350 | 2 | 64 | 76 | 43 | 48 |
| 1459434 | 350 | 2 | 54 | 59 | 31 | 34 |
| 1459435 | 350 | 2 | 60 | 74 | 55 | 71 |
| 1459436 | 350 | 2 | 53‡ | 65‡ | 77‡ | 87‡ |
| 1459437 | 350 | 2 | 27‡ | 36‡ | 46‡ | 55‡ |
| 1459438 | 350 | 2 | 37 | 47 | 37 | 48 |
| 1459439 | 350 | 2 | 77 | 93 | 78 | 101 |
| 1459440 | 350 | 2 | 45‡ | 48‡ | 38‡ | 44‡ |
| 1459441 | 350 | 2 | 45 | 55 | 39 | 52 |
| 1459444 | 350 | 2 | 45 | 56 | 54 | 64 |
| 1459446 | 350 | 2 | 68 | 87 | 93 | 121 |
| 1459449 | 350 | 2 | 65 | 71 | 35 | 46 |
| 1459450 | 350 | 2 | 63 | 75 | 47 | 54 |
| 1459451 | 350 | 2 | 59 | 66 | 47 | 60 |
| 1459455 | 350 | 2 | 54 | 67 | 79 | 90 |
| 1459456 | 350 | 2 | 83 | 96 | 82 | 109 |
| 1459457 | 350 | 2 | 74‡ | 79‡ | 72‡ | 104‡ |
| 1459458 | 350 | 2 | 41 | 50 | 36 | 45 |
| 1459461 | 350 | 2 | 67 | 82 | 54 | 77 |
| 1459463 | 350 | 2 | 73 | 88 | 75 | 98 |
| 1459465 | 350 | 2 | 31 | 43 | 53 | 66 |
| 1459981 | 350 | 2 | 34 | 40 | 34 | 41 |
| 1459985 | 350 | 2 | 22‡ | 37 | 21‡ | 38 |
| 1459986 | 350 | 2 | 53‡ | 59 | 44‡ | 62 |
| 1459988 | 350 | 2 | 47 | 69 | 72 | 86 |
| 1459989 | 350 | 2 | 48 | 61 | 48 | 55 |
| 1460166 | 350 | 2 | 38 | 47 | 53 | 63 |
| 1460170 | 350 | 2 | 52 | 69 | 48 | 63 |
| 1460171 | 350 | 2 | 58 | 67 | 77 | 92 |
| 1460178 | 350 | 2 | 50 | 58 | 63 | 66 |
| 1460179 | 350 | 2 | 77 | 98 | 82 | 121 |
| 1460185 | 350 | 2 | 68 | 70 | 83 | 93 |
| 1052866 | 350 | 2 | 41 | 42 | 47 | 57 |
| 1052868 | 350 | 2 | 34 | 34 | 30 | 34 |
| 1052869 | 350 | 2 | 57 | 60 | 55 | 62 |
| 1052877 | 350 | 2 | 22‡ | 32‡ | 33‡ | 39‡ |
| 1052879 | 350 | 1 | 33 | 43 | 31 | 41 |
| 1273291 | 100 | 2 | 47‡ | 67‡ | 29‡ | 36‡ |
| 1338115 | 100 | 2 | 21 | 26 | 7 | 8 |
| | 350 | 2 | 13 | 16 | 5 | 4 |
| 1380378 | 350 | 2 | 30‡ | 42 | 27‡ | 41 |
| 1380456 | 350 | 1 | 99 | 134 | 88 | 107 |
| 1380457 | 350 | 1 | 59 | 73 | 43 | 60 |
| 1380571 | 350 | 1 | 29 | 39 | 44 | 54 |
| 1380815 | 350 | 2 | 59 | 63 | 71 | 78 |
| 1380870 | 350 | 1 | 62 | 78 | 58 | 69 |
| 1380962 | 350 | 1 | 57 | 70 | 55 | 62 |
| 1380993 | 350 | 2 | 71‡ | 97‡ | 80‡ | 97‡ |
| 1381037 | 350 | 2 | 55 | 60 | 55 | 67 |
| 1381363 | 350 | 2 | 78 | 69 | 44 | 52 |
| 1400744 | 100 | 2 | 27‡ | 42 | 12‡ | 21 |
| | 350 | 2 | 21‡ | 34 | 13‡ | 23 |
| 1400761 | 100 | 2 | 18 | 23 | 6 | 6 |
| 1400776 | 100 | 2 | 30 | 42 | 29 | 36 |
| 1459314 | 350 | 2 | 43‡ | 49‡ | 46‡ | 51‡ |
| 1459315 | 350 | 2 | 61 | 77 | 60 | 74 |
| 1459320 | 350 | 2 | 43 | 52 | 43 | 59 |
| 1459322 | 350 | 1 | 53 | 68 | 38 | 47 |
| 1459323 | 350 | 2 | 39 | 39 | 30 | 42 |
| 1459324 | 350 | 2 | 68 | 71 | 56 | 59 |
| 1459326 | 350 | 2 | 71 | 71 | 64 | 76 |
| 1459328 | 350 | 2 | 97 | 132 | 23 | 37 |
| 1459329 | 350 | 2 | 30 | 38 | 39 | 58 |
| 1459330 | 350 | 2 | 43 | 55 | 45 | 62 |
| 1459345 | 350 | 2 | 66 | 81 | 82 | 96 |
| 1459346 | 350 | 2 | 55‡ | 60‡ | 57‡ | 76‡ |
| 1459351 | 350 | 2 | 42 | 54 | 48 | 64 |
| 1459355 | 350 | 2 | 49 | 64 | 64 | 88 |
| 1459356 | 350 | 2 | 51 | 57 | 74 | 82 |
| 1459365 | 350 | 2 | 41‡ | 44‡ | 23‡ | 34‡ |
| 1459366 | 350 | 2 | 42 | 44 | 38 | 53 |
| 1459368 | 350 | 2 | 63 | 69 | 78 | 77 |
| 1459375 | 350 | 2 | 29 | 28 | 17 | 27 |
| 1459386 | 350 | 2 | 47 | 54 | 47 | 52 |
| 1459387 | 350 | 2 | 66 | 59 | 50 | 63 |
| 1459392 | 350 | 2 | 43 | 49 | 41 | 49 |
| 1459393 | 350 | 2 | 75‡ | 82‡ | 84‡ | 97‡ |
| 1459394 | 350 | 2 | 64‡ | 76‡ | 83‡ | 107‡ |
| 1459400 | 350 | 2 | 44 | 59 | 63 | 86 |
| 1459401 | 350 | 2 | 72 | 83 | 73 | 77 |
| 1459402 | 350 | 2 | 81 | 97 | 83 | 93 |
| 1459406 | 350 | 2 | 61 | 58 | 55 | 59 |
| 1459413 | 350 | 2 | 46‡ | 53‡ | 64‡ | 73‡ |
| 1459417 | 350 | 2 | 29 | 29 | 32 | 41 |
| 1459421 | 350 | 2 | 53 | 59 | 56 | 62 |
| 1459425 | 350 | 2 | 54 | 58 | 37 | 49 |
| 1459429 | 350 | 2 | 63 | 75 | 82 | 99 |
| 1459442 | 350 | 2 | 29 | 29 | 23 | 27 |
| 1459443 | 350 | 2 | 26 | 25 | 12 | 17 |
| 1459445 | 350 | 2 | 55‡ | 75‡ | 89‡ | 106‡ |
| 1459452 | 350 | 2 | 57‡ | 62‡ | 76‡ | 91‡ |
| 1459453 | 350 | 2 | 67 | 70 | 56 | 68 |
| 1459459 | 350 | 2 | 36 | 45 | 36 | 42 |
| 1459462 | 350 | 2 | 52 | 57 | 62 | 69 |
| 1459464 | 350 | 2 | 74 | 87 | 81 | 88 |
| 1459974 | 350 | 1 | 21† | 35 | 23† | 34 |
| 1459975 | 350 | 2 | 45† | 68 | 29† | 45 |
| 1459976 | 350 | 2 | 56† | 68 | 28† | 36 |
| 1459977 | 350 | 2 | 36† | 48 | 32† | 48 |
| 1459978 | 350 | 1 | 51† | 69 | 50† | 65 |
| 1459979 | 350 | 2 | 28† | 42 | 29† | 44 |
| 1459982 | 350 | 1 | 46 | 55 | 48 | 54 |
| 1459983 | 350 | 2 | 55‡ | 73‡ | 46‡ | 67‡ |
| 1459987 | 350 | 2 | 50† | 60 | 41† | 60 |
| 1459990 | 350 | 1 | 54 | 121 | 68 | 90 |
| 1459991 | 350 | 1 | 33 | 46 | 49 | 59 |
| 1460162 | 350 | 2 | 70 | 81 | 77 | 100 |
| 1460163 | 350 | 2 | 67 | 71 | 74 | 79 |
| 1460164 | 350 | 2 | 65 | 68 | 54 | 68 |
| 1460168 | 350 | 2 | 63 | 69 | 69 | 79 |
| 1460174 | 350 | 1 | 63 | 89 | 73 | 89 |
| 1460184 | 350 | 2 | 56 | 60 | 59 | 64 |

‡Indicates that fewer than 2 samples were available for analysis

TABLE 74
Reduction of human DMPK RNA in DMSXL
transgenic mice at a dose of 350 μg

| | | DMPK RNA (% control) | | | |
|---|---|---|---|---|---|
| Compound | | CORTEX | | SPINAL CORD | |
| No. | n | RTS38096 | RTS38095 | RTS38096 | RTS38095 |
| PBS | 3 | 100 | 100 | 100 | 100 |
| 1380987 | 2 | 81 | 92 | 65 | 85 |
| 1459373 | 2 | 23 | 20 | 26 | 27 |
| 1459415 | 2 | 49 | 66 | 55 | 72 |
| 1459973 | 2 | 88† | 84 | 72† | 84 |
| 1459980 | 2 | 75 | 86 | 69 | 77 |
| 1511076 | 2 | 75 | 82 | 69 | 73 |
| 1511077 | 2 | 73 | 81 | 67 | 79 |
| 1511078 | 2 | 84 | 95 | 60 | 67 |
| 1511079 | 2 | 85 | 87 | 71 | 83 |
| 1511080 | 2 | 73 | 85 | 59 | 65 |
| 1511081 | 2 | 75‡ | 92‡ | 63‡ | 77‡ |
| 1511082 | 2 | 84 | 95 | 84 | 98 |
| 1511083 | 2 | 62‡ | 71‡ | 44‡ | 62‡ |
| 1511084 | 2 | 52 | 60 | 42 | 56 |
| 1511085 | 2 | 60 | 69 | 59 | 75 |
| 1511086 | 2 | 57 | 69 | 52 | 60 |
| 1511087 | 2 | 67 | 94 | 54 | 72 |
| 1511088 | 2 | 56 | 68 | 57 | 77 |
| 1511089 | 2 | 66 | 98 | 68 | 98 |
| 1511090 | 2 | 61 | 91 | 49 | 71 |
| 1511091 | 2 | 70 | 94 | 60 | 93 |
| 1511092 | 2 | 72 | 92 | 59 | 73 |
| 1511093 | 2 | 70 | 89 | 67 | 94 |
| 1511094 | 2 | 66 | 84 | 70 | 106 |
| 1511095 | 2 | 59 | 82 | 56 | 92 |
| 1511096 | 2 | 76 | 103 | 66 | 104 |
| 1511097 | 2 | 84 | 110 | 71 | 104 |
| 1511098 | 2 | 90 | 114 | 89 | 112 |
| 1511099 | 2 | 70 | 93 | 74 | 101 |
| 1511100 | 2 | 50 | 64 | 57 | 81 |
| 1511101 | 2 | 62 | 78 | 64 | 98 |
| 1511102 | 2 | 56 | 74 | 49 | 72 |
| 1511103 | 2 | 89 | 118 | 87 | 117 |
| 1511104 | 2 | 78 | 90 | 58 | 85 |
| 1511105 | 2 | 85 | 110 | 87 | 106 |
| 1511106 | 2 | 67 | 79 | 52 | 64 |
| 1511107 | 2 | 62 | 68 | 61 | 88 |

‡Indicates that fewer than 2 samples were available for analysis

### Example 12: Activity of Modified Oligonucleotides Complementary to Human DMPK in DM20 Transgenic Mice

[0388] Modified oligonucleotides described above were tested in DM20 transgenic mice previously described in Seznec H, et. al, Transgenic mice carrying large human genomic sequences with expanded CTG repeat mimic closely the DM CTG repeat intergenerational and somatic instability; Human Molecular Genetics, 2000, vol. 9, no. 8: 1185-1194.

### Treatment

[0389] DM20 transgenic mice were divided into groups of 1-2 mice each. Each mouse received a single ICV bolus of 350 μg of modified oligonucleotide as indicated in the tables below. A group of 2 mice received PBS as a negative control.

### RNA Analysis

[0390] Two weeks post treatment, mice were sacrificed, and RNA was extracted from cortical brain tissue, spinal cord, hippocampus, striatum, and cerebellum for RTPCR analysis to measure amount of DMPK RNA using human primer probe set RTS3164 (forward nucleobase sequence AGCCTGAGCCGGGAGATG, designated herein as SEQ ID NO: 15; reverse nucleobase sequence GCGTAGTTGACTGGCGAAGTT, designated herein as SEQ ID NO: 16; probe nucleobase sequence AGGCCATCCGCACGGACAACCX, designated herein as SEQ ID NO: 17). Results are presented as percent human DMPK RNA relative to PBS control, normalized to mouse GAPDH (% control). Mouse GAPDH was amplified using mouse primer probe set mGapdh_LTS00102 (forward nucleobase sequence GGCAAATTCAACGGCACAGT, designated herein as SEQ ID NO: 12; reverse nucleobase sequence GGGTCTCGCTCCTGGAAGAT, designated herein as SEQ ID NO: 13; probe nucleobase sequence AAGGCCGAGAATGGGAAGCTTGTCATC, designated herein as SEQ ID NO: 14).

TABLE 75
Reduction of human DMPK RNA in DM20
transgenic mice at a dose of 350 μg

| | | DMPK RNA (% control) | | | | |
|---|---|---|---|---|---|---|
| Compound | | | Spinal | | Hippo- | Cere- |
| No. | n | Cortex | Cord | Striatum | campus | bellum |
| PBS | 2 | 100 | 100 | 100 | 100 | 100 |
| 1052865 | 2 | 67 | 66 | 105 | 106 | 86 |
| 1052866 | 2 | 41 | 65 | 92 | 57 | 77 |
| 1052867 | 2 | 38 | 77 | 62 | 39 | 41 |
| 1052868 | 2 | 40 | 45 | 47 | 43 | 49 |
| 1052871 | 2 | 107 | 63 | 55 | 73 | 78 |
| 1052874 | 2 | 47 | 67 | 64 | 96 | 68 |
| 1052876 | 2 | 61 | 66 | 86 | 116 | 75 |
| 1052877 | 2 | 28 | 35 | 75 | 56 | 46 |
| 1052883 | 1 | 69 | 74 | 64 | 99 | 65 |
| 1052887 | 2 | 92 | 84 | 79 | 81 | 71 |
| 1052889 | 2 | 72 | 114 | 67 | 92 | 78 |

### Example 13: Activity of Modified Oligonucleotides Complementary to Human DMPK in DMSXL Transgenic Mice, Multiple Dose

[0391] DMSXL transgenic mice (described herein above) were used to determine dose response activity of modified oligonucleotides complementary to human DMPK.

### Treatment

[0392] DMSXL transgenic mice were divided into groups of 2-4 mice each. Each mouse received a single ICV bolus of modified oligonucleotide at various doses indicated in the table below. A group of 4-6 mice received a single ICV bolus of PBS as a negative control.

### RNA Analysis

[0393] Two weeks post treatment, mice were sacrificed, and RNA was extracted from cortical brain tissue and spinal cord for RTPCR analysis to measure amount of DMPK RNA using human primer probe set RTS38096 (described herein above). Results are presented as percent human DMPK RNA relative to PBS control, normalized to mouse GAPDH (% control). Mouse GAPDH was amplified using mouse primer probe set mGapdh_LTS00102 (described herein above). ED50s were calculated in Prism using nonlinear fit with variable slope (four parameter), top constrained to 100% (or 1), bottom constrained to 0. Y=Bottom+(Top−Bottom)/(1+(IC50/X)\hat{ }HillSlope).

[0394] Compound No. 486178 is described herein above.

TABLE 76
Reduction of human DMPK RNA in DMSXL transgenic mice

| | | DMPK RNA (% control) | | | |
|---|---|---|---|---|---|
| | | | | SPINAL | |
| Compound | Dose | CORTEX | ED50 | CORD | ED50 |
| No. | (μg) | (RTS38096) | (μg) | (RTS38096) | (μg) |
| PBS | N/A | 100 | — | 100 | — |
| 1052877 | 10 | 100 | 220 | 92 | 68 |
| | 30 | 90 | | 64 | |
| | 100 | 74 | | 40 | |
| | 300 | 51 | | 28 | |
| | 700 | 34 | | 21 | |
| 1380679 | 10 | 98 | 226 | 78 | 95 |
| | 30 | 91 | | 59 | |
| | 100 | 87 | | 57 | |
| | 300 | 41 | | 36 | |
| | 700 | 36 | | 28 | |
| 1381668 | 10 | 100 | 221 | 90 | 89 |
| | 30 | 100 | | 77 | |
| | 100 | 76 | | 39 | |
| | 300 | 50 | | 27 | |
| | 700 | 30 | | 34 | |
| 1459328 | 10 | 110 | 261 | 84 | 152 |
| | 30 | 93 | | 70 | |
| | 100 | 74 | | 71 | |
| | 300 | 52 | | 32 | |
| | 700 | 42 | | 30 | |
| 1459329 | 10 | 117 | 384 | 94 | 226 |
| | 30 | 113 | | 89 | |
| | 100 | 84 | | 63 | |
| | 300 | 63 | | 44 | |
| | 700 | 44 | | 41 | |
| 1459374 | 10 | 84 | 139 | 65 | 26 |
| | 30 | 83 | | 43 | |
| | 100 | 71 | | 35 | |
| | 300 | 39 | | 24 | |
| | 700 | 29 | | 22 | |
| 1459375 | 10 | 102 | 175 | 60 | 16 |
| | 30 | 88 | | 35 | |
| | 100 | 68 | | 26 | |
| | 300 | 46 | | 17 | |
| | 700 | 32 | | 12 | |
| 1459442 | 10 | 82 | 109 | 75 | 32 |
| | 30 | 79 | | 46 | |
| | 100 | 64 | | 33 | |
| | 300 | 36 | | 23 | |
| | 700 | 31 | | 20 | |
| 1459443 | 10 | 78 | 149 | 71 | 25 |
| | 30 | 89 | | 43 | |
| | 100 | 73 | | 31 | |
| | 300 | 42 | | 16 | |
| | 700 | 24 | | 14 | |
| 1511084 | 10 | 91 | 289 | 114 | 205 |
| | 30 | 96 | | 91 | |
| | 100 | 81 | | 55 | |
| | 300 | 56 | | 42 | |
| | 700 | 38 | | 37 | |

TABLE 77
Reduction of human DMPK RNA in DMSXL transgenic mice

| | | DMPK RNA (% control) | | | |
|---|---|---|---|---|---|
| | | | | SPINAL | |
| Compound | Dose | CORTEX | ED50 | CORD | ED50 |
| No. | (μg) | (RTS38096) | (μg) | (RTS38096) | (μg) |
| PBS | 0 | 100 | | 100 | |
| 486178 | 3 | 108 | 69 | 67 | 5.5 |
| | 10 | 83 | | 30 | |
| | 30 | 83 | | 22 | |
| | 100 | 46 | | 24 | |
| 1400761 | 3 | 89 | 52 | 62 | 3.7 |
| | 10 | 80 | | 17 | |
| | 30 | 78 | | 15 | |
| | 100 | 41 | | 7 | |
| 1338115 | 3 | 97 | 42 | 68 | 4.4 |
| | 10 | 89 | | 21 | |
| | 30 | 75 | | 18 | |
| | 100 | 24 | | 7 | |

### Example 14: Activity of Modified Oligonucleotides Complementary to Human DMPK in DMSXL Transgenic Mice, Single Dose

[0395] Modified oligonucleotides described above were tested in DMSXL transgenic mice previously described in Huguet A, et. al, Molecular, Physiological, and Motor Performance Defects in DMSXL Mice Carrying >1,000 CTG Repeats from the Human DM1 Locus; PLOS Genetics, 2012, vol. 8, no. 11: e1003043.

### Treatment

[0396] DMSXL transgenic mice were divided into groups of 4 mice each. Each mouse received subcutaneous injections of modified oligonucleotide at a dose of 10 mg/kg once a week for two weeks (a total of 3 treatments). One group of 4 mice received subcutaneous injections of PBS once a week for two weeks (a total of 3 treatments). The PBS-injected group served as the control group to which modified oligonucleotide-treated groups were compared.

### RNA Analysis

[0397] 7 days post the final treatment, mice were sacrificed and RNA was extracted from mouse quadriceps muscle, gastrocnemius muscle, and/or tibialis anterior muscle, as specified in the tables below, for real-time RTPCR analysis of DMPK RNA expression. Human DMPK primer probe set RTS3164 (forward nucleobase sequence AGCCTGAGCCGGGAGATG, designated herein as SEQ ID NO: 2360; reverse nucleobase sequence GCGTAGTTGACTGGCGAAGTT, designated herein as SEQ ID NO: 2361; probe nucleobase sequence AGGCCATCCGCACGGACAACC, designated herein as SEQ ID NO: 2362) was used to measure human DMPK RNA levels as indicated in the tables below. DMPK RNA levels were normalized either to total RNA content, as measured to mouse GAPDH. Mouse GAPDH was amplified using mouse primer probe set mGapdh_LTS00102 (forward nucleobase sequence GGCAAATTCAACGGCACAGT, designated herein as SEQ ID NO: 2363; reverse nucleobase sequence GGGTCTCGCTCCTGGAAGAT, designated herein as SEQ ID NO: 2364; probe nucleobase sequence AAGGCCGAGAATGGGAAGCTTGTCATC, designated herein as SEQ ID NO: 2365). Results are presented as percent DMPK RNA, relative to the amount in PBS treated animals (% control). In some cases, values for certain tissue types were not calculated for all ASOs. In these cases, ‘N.C.’ is used in the tables indicates that the values were not calculated. The Compound No. marked with a “†” indicates that the modified oligonucleotide is complementary to the amplicon region of the primer probe set. Additional assays may be used to measure the activity of the modified oligonucleotides complementary to the amplicon region.

[0398] Compound No. 598769 is described herein above.

TABLE 78
Reduction of human DMPK in DMSXL transgenic mice

| | DMPK RNA (% control) | | |
|---|---|---|---|
| | | | Tibialis |
| Compound No. | Quadriceps | Gastrocnemius | Anterior |
| PBS | 100 | 100 | 100 |
| 1046921 | 76 | N.C. | N.C. |
| 1046922 | 69 | N.C. | N.C. |
| 1046935 | 87 | N.C. | N.C. |
| 1046936 | 83 | N.C. | N.C. |
| 1046948 | 44 | 57 | 75 |
| 1046952 | 66 | N.C. | N.C. |

TABLE 79
Reduction of human DMPK in DMSXL transgenic mice

| | DMPK RNA |
|---|---|
| | (% control) |
| Compound No. | Quadriceps |
| PBS | 100 |
| 1059473 | 77 |
| 1059474 | 86 |
| 1059475 | 90 |
| 1059476 | 80 |
| 1059477 | 84 |
| 1059478 | 59 |
| 1059892 | 91 |
| 1059903 | 105 |

TABLE 80
Reduction of human DMPK in DMSXL transgenic mice

| | DMPK RNA (% control) | | |
|---|---|---|---|
| Compound | | | Tibialis |
| No. | Quadriceps | Gastrocnemius | Anterior |
| PBS | 100 | 100 | 100 |
| 1059889 | 33 | 57 | 53 |
| 1059890 | 49 | 66 | 62 |
| 1060866 | 105 | N.C. | N.C. |
| 1060875 | 64 | N.C. | N.C. |
| 1060883 | 60 | N.C. | N.C. |
| 1060886 | 100 | N.C. | N.C. |
| 1060889 | 82 | N.C. | N.C. |
| 1060891 | 75 | N.C. | N.C. |
| 1060897 | 79 | N.C. | N.C. |
| 1060898 | 73 | N.C. | N.C. |
| 1060899 | 62 | N.C. | N.C. |
| 1060900 | 73 | N.C. | N.C. |
| 1060906 | 80 | N.C. | N.C. |
| 1060909 | 62 | N.C. | N.C. |
| 1060914 | 89 | N.C. | N.C. |
| 1060916 | 71 | N.C. | N.C. |
| 1060917 | 86 | N.C. | N.C. |
| 1060921 | 77 | N.C. | N.C. |
| 1060923 | 40 | 64 | 58 |

TABLE 81
Reduction of human DMPK in DMSXL transgenic mice

| | DMPK RNA |
|---|---|
| Compound | (% control) |
| No. | Quadriceps |
| PBS | 100 |
| 1162310 | 66 |
| 1162311 | 65 |
| 1162628 | 79 |
| 1162632 | 104 |
| 1162633 | 97 |
| 1162634 | 101 |
| 1162636 | 96 |
| 1162638 | 126 |
| 1162643 | 62 |
| 1162645 | 105 |
| 1162647 | 126 |
| 1162654 | 77 |
| 1162655 | 60 |
| 1162658 | 84 |
| 1162635 | 126 |

TABLE 82
Reduction of human DMPK in DMSXL transgenic mice

| | DMPK RNA |
|---|---|
| Compound | (% control) |
| No. | Quadriceps |
| PBS | 100 |
| 598769 | 63 |
| 1059887 | 49 |
| 1060860 | 23 |
| 1064823 | 67 |
| 1176125 | 54 |
| 1176126 | 59 |
| 1176127 | 62 |
| 1176132 | 60 |
| 1176133 | 53 |
| 1176134 | 47 |
| 1176143 | 95 |
| 1176145 | 49 |
| 1176148 | 47 |
| 1176151 | 44 |
| 1176153 | 79 |
| 1176157 | 47 |
| 1176159 | 47 |
| 1176160 | 44 |
| 1176161 | 62 |
| 1176162 | 44 |
| 1176164 | 44 |
| 1176165 | 56 |
| 1184172 | 47 |

TABLE 83
Reduction of human DMPK in DMSXL transgenic mice

| | DMPK RNA |
|---|---|
| Compound | (% control) |
| No. | Quadriceps |
| PBS | 100 |
| 1060860 | 23 |
| 1176142 | 74 |
| 1176151 | 59 |
| 1176148 | 41 |
| 1176157 | 69 |
| 1176159 | 45 |
| 1176160 | 48 |
| 1176163 | 50 |
| 1207018 | 95 |
| 1207019 | 79 |
| 1207020 | 66 |
| 1207021 | 67 |
| 1207024 | 56 |
| 1207025 | 66 |
| 1207072 | 46 |
| 1207074 | 66 |
| 1207075 | 69 |
| 1207130 | 71 |
| 1213273 | 93 |
| 1213275 | 97 |
| 1213276 | 84 |
| 1215869 | 67 |
| 1215870 | 89 |
| 1213282 | 56 |
| 1240824 | 79 |
| 1240825 | 59 |
| 1240826 | 57 |
| 1241201 | 72 |

TABLE 84
Reduction of human DMPK in DMSXL transgenic mice

| | DMPK RNA |
|---|---|
| Compound | (% control) |
| No. | Quadriceps |
| PBS | 100 |
| 1309459 | 77 |
| 1309468 | 79 |
| 1309469 | 71 |
| 1309473 | 75 |
| 1309475 | 44 |
| 1309477† | 76 |
| 1309479 | 55 |
| 1309482 | 55 |

TABLE 85
Reduction of human DMPK in DMSXL transgenic mice

| | DMPK RNA |
|---|---|
| Compound | (% control) |
| No. | Quadriceps |
| PBS | 100 |
| 598769 | 73 |
| 1309484 | 117 |
| 1309485 | 103 |

TABLE 86
Reduction of human DMPK in DMSXL transgenic mice

| | DMPK RNA |
|---|---|
| Compound | (% control) |
| No. | Quadriceps |
| PBS | 100 |
| 1176128 | 46 |
| 1176129 | 54 |
| 1176135 | 37 |
| 1176138 | 35 |
| 1176139 | 39 |
| 1176140 | 42 |
| 1243719 | 31 |
| 1370496 | 49 |
| 1370498 | 103 |
| 1370503 | 73 |
| 1370504 | 82 |
| 1370505 | 37 |
| 1370507 | 80 |
| 1370510 | 50 |

TABLE 87
Reduction of human DMPK in DMSXL transgenic mice

| | DMPK RNA (% control) | | |
|---|---|---|---|
| Compound | | | Tibialis |
| No. | Gastrocnemius | Quadriceps | Anterior |
| PBS | 100 | 100 | 100 |
| 570052 | 73 | 70 | 45 |
| 598769 | 83 | 75 | 71 |
| 1338115 | 52 | 48 | 51 |
| 1400737 | 70 | 66 | 65 |
| 1400739 | 71 | 64 | 51 |
| 1400742 | 88 | 89 | 86 |
| 1400743 | 92 | 82 | 71 |
| 1400744 | 79 | 67 | 63 |
| 1400748 | 69 | 77 | 97 |
| 1400750 | 86 | 79 | 57 |
| 1400752 | 70 | 68 | 62 |
| 1400755 | 87 | 85 | 62 |
| 1400760 | 95 | 96 | 59 |
| 1400761 | 67 | 63 | 31 |
| 1400769 | 69 | 76 | 69 |
| 1400772 | 80 | 79 | 69 |
| 1400775 | 82 | 72 | 35 |
| 1400776 | 73 | 58 | 35 |
| 1400777 | 81 | 83 | 79 |
| 1400778 | 73 | 77 | 62 |

### Example 15: Activity of Modified Oligonucleotides Complementary to Human DMPK in DM20 Transgenic Mice, Single Dose

[0399] Modified oligonucleotides described above were tested in DM20 transgenic mice previously described in Seznec H, et. al, Transgenic mice carrying large human genomic sequences with expanded CTG repeat mimic closely the DM CTG repeat intergenerational and somatic instability; Human Molecular Genetics, 2000, vol. 9, no. 8: 1185-1194.

### Treatment

[0400] DM20 transgenic mice were divided into groups of 4 mice each. Each mouse received subcutaneous injections of modified oligonucleotide at a dose of 10 mg/kg once a week for two weeks (a total of 3 treatments). One group of 4 mice received subcutaneous injections of PBS once a week for two weeks (a total of 3 treatments). The PBS-injected group served as the control group to which modified oligonucleotide-treated groups were compared.

### RNA Analysis

[0401] 7 days after the final treatment, mice were sacrificed and RNA was extracted from mouse quadriceps muscle, gastrocnemius muscle, and/or tibialis anterior muscle for real-time RTPCR analysis of DMPK RNA expression. Human DMPK primer probe set RTS3164 (described herein above) was used to measure human DMPK RNA levels as indicated in the tables below. DMPK RNA levels were normalized total RNA content, as measured to mouse GAPDH.

[0402] Mouse GAPDH was amplified using mouse primer probe set mGapdh_LTS00102 (described herein above) Results are presented as percent DMPK RNA, relative to the amount in PBS treated animals (% control).

TABLE 88
Reduction of human DMPK in DM20 transgenic mice

| | DMPK RNA |
|---|---|
| Compound | (% control) |
| No. | Quadriceps |
| PBS | 100 |
| 1046924 | 83 |
| 1046933 | 90 |
| 1046934 | 75 |
| 1046937 | 72 |
| 1060860 | 21 |
| 1060864 | 79 |
| 1060869 | 113 |
| 1060872 | 48 |
| 1060873 | 51 |
| 1060880 | 125 |
| 1060884 | 163 |
| 1060887 | 85 |
| 1060892 | 99 |
| 1060896 | 115 |
| 1060901 | 130 |
| 1060903 | 95 |
| 1060904 | 157 |
| 1060908 | 85 |
| 1162627 | 104 |
| 1162641 | 42 |

TABLE 89
Reduction of human DMPK in DM20 transgenic mice

| | DMPK RNA (% control) | | |
|---|---|---|---|
| Compound | | | Tibialis |
| No. | Quadriceps | Gastrocnemius | Anterior |
| PBS | 100 | 100 | 100 |
| 1046919 | 57 | 48 | 53 |
| 1046926 | 66 | N.C. | N.C. |
| 1059502 | 63 | N.C. | N.C. |
| 1059503 | 89 | N.C. | N.C. |
| 1059506 | 96 | N.C. | N.C. |
| 1059894 | 81 | N.C. | N.C. |

TABLE 90
Reduction of human DMPK in DM20 transgenic mice

| | DMPK RNA (% control) | | |
|---|---|---|---|
| Compound | | | Tibialis |
| No. | Quadriceps | Gastrocnemius | Anterior |
| PBS | 100 | 100 | 100 |
| 1060867 | 55 | 71 | 83 |
| 1060870 | 59 | 56 | 76 |
| 1060876 | 112 | N.C. | N.C. |
| 1060877 | 108 | N.C. | N.C. |
| 1060878 | 59 | 64 | 83 |
| 1060882 | 93 | N.C. | N.C. |
| 1060893 | 57 | 70 | 86 |
| 1060905 | 61 | N.C. | N.C. |
| 1060911 | 89 | N.C. | N.C. |
| 1060915 | 61 | N.C. | N.C. |
| 1060918 | 91 | N.C. | N.C. |
| 1064824 | 72 | N.C. | N.C. |

### Example 16: Activity of Modified Oligonucleotides Complementary to Human DMPK in DMSXL Transgenic Mice, Multiple Dose

[0403] DMPK DMSXL transgenic mice (described herein above) were used to determine activity of modified oligonucleotides complementary to human DMPK.

### Treatment

[0404] DMSXL transgenic mice were divided into groups of 3-5 mice each. Each mouse received subcutaneous injections of modified oligonucleotide at various doses as indicated in the tables below at once a week for two weeks (a total of 3 treatments). One group of 4-6 mice received subcutaneous injections of PBS once a week for two weeks (a total of 3 treatments). The PBS-injected group served as the control group to which oligonucleotide-treated groups were compared.

### RNA Analysis

[0405] 7 days post the final treatment, mice were sacrificed and RNA was extracted from mouse quadricep muscle, gastrocnemius muscle, heart, tibialis anterior muscle, and triceps muscle for real-time RTPCR analysis of DMPK RNA expression. Human DMPK primer probe sets RTS3164 (described herein above) was used to measure human DMPK RNA levels. DMPK RNA levels were normalized either to total RNA content, as measured to mouse GAPDH. Mouse GAPDH was amplified using mouse primer probe set mGapdh_LTS00102 (described herein above). Results are presented as percent DMPK RNA, relative to the amount in PBS treated animals (% control). ED50s were calculated in GraphPad Prism using nonlinear fit with variable slope (four parameter), top constrained to 100% (or 1), bottom constrained to 0. Y=Bottom+(Top−Bottom)/(1+(IC50/X)\hat{ }HillSlope).

[0406] Compound No. 598769 is described herein above.

[0407] Compound No. 877864 was previously described in WO 2017/053995 A1 and consists of the nucleobase sequence (from 5′ to 3′): ACAATAAATACCGAGG (SEQ ID NO: 1336). The sugar motif for Compound No. 877864 is (from 5′ to 3′): kkkddddddddddkkk; wherein each “d” represents a 2′-β-D-deoxyribosyl sugar moiety, and each “k” represents a cEt sugar moiety. The internucleoside linkage motif for Compound No. 877864 is (from 5′ to 3′): sssssssssssssss; wherein each “s” represents a phosphorothioate internucleoside linkage. Each cytosine residue in Compound No. 877864 is a 5-methylcytosine. Compound No. 877864 is conjugated to a 6-palmitamidohexyl phosphate conjugate group attached to the 5′-OH of the oligonucleotide. The structure for the conjugate group is:

[chemical structure]

TABLE 91
Reduction of human DMPK in DMSXL transgenic mice

Quadriceps

| | | DMPK RNA | |
|---|---|---|---|
| Compound | Dose | (% control) | ED50 |
| No. | (mg/kg) | RTS3164 | (mg/kg) |
| PBS | N/A | 100 | — |
| 570052 | 9 | 58 | — |
| 598769 | 1 | 82 | 12.5 |
| | 3 | 71 | |
| | 9 | 62 | |
| | 27 | 41 | |
| | 81 | 26 | |
| 1059889 | 1 | 80 | 8.1 |
| | 3 | 82 | |
| | 9 | 49 | |
| | 27 | 20 | |
| | 81 | 5 | |
| 1060923 | 1 | 80 | 5.0 |
| | 3 | 67 | |
| | 9 | 36 | |
| | 27 | 22 | |
| | 81 | 11 | |
| 1064823 | 9 | 55 | — |
| 1273291 | 10 | 24 | — |
| 1273292 | 10 | 41 | — |
| 1273297 | 10 | 23 | — |
| 1273301 | 10 | 38 | — |
| 1273313 | 1 | 91 | 22.5 |
| | 3 | 86 | |
| | 9 | 74 | |
| | 27 | 51 | |
| | 81 | 22 | |

TABLE 92
Reduction of human DMPK in DMSXL transgenic mice

Quadriceps

| Compound | Dose | DMPK RNA | ED50 |
|---|---|---|---|
| No. | (mg/kg) | (% control) | (mg/kg) |
| PBS | N/A | 100 | — |
| 598769 | 12.5 | 50 | — |
| 1003033 | 1 | 94 | 5.5 |
| | 3 | 73 | |
| | 9 | 35 | |
| | 27 | 14 | |
| 1273291 | 1 | 96 | 6.1 |
| | 3 | 86 | |
| | 9 | 30 | |
| | 27 | 6 | |

TABLE 93
Reduction of human DMPK in DMSXL transgenic mice

| | | Quadriceps | | | | Gastrocnemius | | Heart | |
|---|---|---|---|---|---|---|---|---|---|
| | | DMPK | | DMPK | | DMPK | | DMPK | |
| | | RNA (% | | RNA (% | | RNA (% | | RNA (% | |
| Compound | Dose | control) | ED50 | control) | ED50 | control) | ED50 | control) | ED50 |
| No. | (mg/kg) | RTS3164 | (mg/kg) | RTS38095 | (mg/kg) | RTS3164 | (mg/kg) | RTS3164 | (mg/kg) |
| PBS | N/A | 100 | — | 100 | — | 100 | — | 100 | — |
| 598769 | 3 | 71 | 15 | 77 | 21 | 73 | 28 | 88 | 73 |
| | 10 | 56 | | 73 | | 67 | | 91 | |
| | 30 | 39‡ | | 35‡ | | 41‡ | | 65‡ | |
| | 60 | 30 | | 32 | | 52 | | 59 | |
| 1400737 | 3 | 76 | 23 | 78 | 25 | 61 | 15 | 96 | 70 |
| | 10 | 73 | | 71 | | 60 | | 107 | |
| | 30 | 42‡ | | 48‡ | | 47‡ | | 62‡ | |
| | 60 | 32 | | 33 | | 26 | | 60 | |
| 1400739 | 3 | 84 | 15 | 82 | 18 | 93 | 21 | 106 | 29 |
| | 10 | 57 | | 63 | | 65 | | 63 | |
| | 30 | 34 | | 37 | | 41 | | 46 | |
| | 60 | 24‡ | | 21 | | 26 | | 43 | |
| 1400743 | 3 | 75 | 24 | 85 | 36 | 71 | 20 | 76 | 42 |
| | 10 | 63 | | 75 | | 58 | | 73 | |
| | 30 | 48 | | 57 | | 51 | | 58 | |
| | 60 | 39 | | 40 | | 33 | | 51 | |
| 1400744 | 3 | 71 | 18 | 88 | 26 | 71 | 14 | 82 | 48 |
| | 10 | 59 | | 69 | | 54 | | 77 | |
| | 30 | 46 | | 46 | | 38 | | 63 | |
| | 60 | 29 | | 34 | | 27 | | 49 | |
| 1400752 | 3 | 78 | 23 | 93 | 29 | 61 | 11 | 83 | 56 |
| | 10 | 62 | | 64 | | 51 | | 65 | |
| | 30 | 44 | | 47 | | 35 | | 73 | |
| | 60 | 39 | | 43 | | 29 | | 53 | |
| 1400769 | 3 | 90 | 18 | 93 | 15 | 71 | 11 | 98 | 52 |
| | 10 | 62 | | 51 | | 53 | | 93 | |
| | 30 | 37 | | 37 | | 31 | | 61 | |
| | 60 | 23‡ | | 21‡ | | 20‡ | | 38‡ | |
| 1400775 | 3 | 96 | 115 | 91 | 68 | 81 | 40 | 100 | 142 |
| | 10 | 77 | | 85 | | 72 | | 96 | |
| | 30 | 92 | | 72 | | 54 | | 80 | |
| | 60 | 61 | | 53 | | 51 | | 73 | |
| 1400776 | 3 | 80 | 23 | 88‡ | 33 | 76 | 23 | 92 | 67 |
| | 10 | 63‡ | | 70‡ | | 48‡ | | 59‡ | |
| | 30 | 41 | | 46 | | 43 | | 62 | |
| | 60 | 40 | | 47 | | 41 | | 62 | |

‡indicates that fewer than 4 samples are available

TABLE 94
Reduction of human DMPK in DMSXL transgenic mice

Quadriceps

| Compound | Dose | DMPK RNA | ED50 |
|---|---|---|---|
| No. | (mg/kg) | (% control) | (mg/kg) |
| PBS | N/A | 100 | — |
| 877864 | 3 | 88 | 17.1 |
| | 9 | 63 | |
| | 27 | 40 | |
| 1046939 | 3 | 69 | 8.4 |
| | 9 | 48 | |
| | 27 | 29 | |

### Example 17: Activity of Modified Oligonucleotides Complementary to Human DMPK DM20 Transgenic Mice, Multiple Dose

[0408] DM20 transgenic mice (described herein above) were used to determine activity of modified oligonucleotides complementary to human DMPK.

### Treatment

[0409] DM20 transgenic mice were divided into groups of 4 mice each. Each mouse received subcutaneous injections of modified oligonucleotide at various doses indicated in the table below at once a week for two weeks (a total of 3 treatments). One group of 4 mice received subcutaneous injections of PBS once a week for two weeks (a total of 3 treatments). The PBS-injected group served as the control group to which oligonucleotide-treated groups were compared.

### RNA Analysis

[0410] 7 days after the final treatment, mice were sacrificed and RNA was extracted from mouse quadricep muscle for real-time RTPCR analysis of DMPK RNA expression. Human DMPK primer probe sets RTS3164 (described herein above) was used to measure human DMPK RNA levels. DMPK RNA levels were normalized either to total RNA content, as measured to mouse GAPDH. Mouse GAPDH was amplified using mouse primer probe set mGapdh_LTS00102 (described herein above). Results are presented as percent DMPK RNA, relative to the amount in PBS treated animals (% control). ED50s were calculated in GraphPad Prism using nonlinear fit with variable slope (four parameter), top constrained to 100% (or 1), bottom constrained to 0. Y=Bottom+(Top−Bottom)/(1+(IC50/X)\hat{ }HillSlope).

[0411] Compound No. 877864 is described herein above.

TABLE 95
Reduction of human DMPK in DM20 transgenic mice

Quadriceps

| Compound | Dose | DMPK RNA | ED50 |
|---|---|---|---|
| No. | (mg/kg) | (% control) | (mg/kg) |
| PBS | N/A | 100 | — |
| 877864 | 3 | 91 | 17.8 |
| | 9 | 75 | |
| | 27 | 34‡ | |

‡indicates that there are fewer than 4 samples available

### Example 18: Dose-Dependent Inhibition of Human DMPK in A431 Cells by Modified Oligonucleotides

[0412] Modified oligonucleotides selected from the examples above were tested at various doses in A431 cells. The modified oligonucleotides were tested in a series of experiments using the same culture conditions. The results for each experiment are presented in separate tables shown below. Cells were plated at a density of 11,000 cells per well and were treated using free uptake with modified oligonucleotides at various doses, as specified in the tables below. After a treatment period of approximately 48 hours, DMPK RNA levels were measured as previously described using the human DMPK primer-probe set RTS38095 (described herein above). DMPK RNA levels were normalized to total RNA, as measured by RIBOGREEN®. Results are presented as percent DMPK RNA, relative to the amount in untreated control cells (% UTC).

[0413] The half maximal inhibitory concentration (IC₅₀) of each modified oligonucleotide was calculated in GraphPad prism using a log(inhibitor) vs. normalized response—Variable slope formula.

TABLE 96
Dose-dependent reduction of human DMPK RNA
in A431 cells by modified oligonucleotides

| | DMPK RNA (% UTC) | | | | | | | | | | |
|---|---|---|---|---|---|---|---|---|---|---|---|
| Compound | 10000 | 3333 | 1111 | 370 | 123 | 41 | 14 | 5 | 2 | 1 | IC₅₀ |
| No. | nM | nM | nM | nM | nM | nM | nM | nM | nM | nM | (μM) |
| 570052 | 5 | 8 | 8 | 14 | 31 | 64 | 77 | 94 | 98 | 90 | 0.06 |
| 598769 | 13 | 17 | 24 | 36 | 51 | 69 | 77 | 81 | 85 | 76 | 0.12 |
| 1338115 | 24 | 18 | 20 | 19 | 19 | 36 | 58 | 67 | 78 | 76 | 0.02 |
| 1400737 | 3 | 3 | 5 | 13 | 28 | 58 | 84 | 81 | 80 | 82 | 0.05 |
| 1400739 | 1 | 1 | 3 | 8 | 26 | 58 | 84 | 84 | 97 | 97 | 0.05 |
| 1400742 | 7 | 12 | 25 | 42 | 67 | 83 | 110 | 118 | 105 | 111 | 0.30 |

TABLE 97
Dose-dependent reduction of human DMPK RNA
in A431 cells by modified oligonucleotides

| | DMPK RNA (% UTC) | | | | | | | | | | |
|---|---|---|---|---|---|---|---|---|---|---|---|
| Compound | 10000 | 3333 | 1111 | 370 | 123 | 41 | 14 | 5 | 2 | 1 | IC₅₀ |
| No. | nM | nM | nM | nM | nM | nM | nM | nM | nM | nM | (μM) |
| 1400743 | 18 | 23 | 31 | 48 | 63 | 72 | 82 | 89 | 91 | 83 | 0.29 |
| 1400744 | 9 | 10 | 17 | 28 | 52 | 71 | 80 | 81 | 89 | 88 | 0.11 |
| 1400748 | 11 | 15 | 24 | 36 | 57 | 82 | 84 | 86 | 100 | 88 | 0.20 |
| 1400750 | 12 | 12 | 23 | 37 | 55 | 69 | 85 | 89 | 105 | 84 | 0.17 |
| 1400752 | 25 | 25 | 31 | 46 | 66 | 78 | 87 | 98 | 98 | 103 | 0.40 |
| 1400755 | 0 | 0 | 1 | 3 | 15 | 54 | 95 | 97 | 104 | 118 | 0.05 |
| 1400760 | 21 | 20 | 23 | 26 | 44 | 82 | 125 | 128 | 121 | 136 | 0.16 |

The application's sequence listing, which the Patent Office published only in electronic form, follows.

SEQUENCE LISTING (2334 sequences)

SEQ ID NO: 1 - DNA, 27001 bp, Homo sapiens
  source 1..27001: mol_type = genomic DNA
acttgaacccaggaggcagaggttgcagtgagccaaaatcgtcccattgcactccagcccacgtgacaagagcgagactctgtctcaaaaaaaaaaaaaaaaaaaaaaaaagccgggtgcagtggctcatgcctgtactcccagcactttgggaggccgaggtgggtggatcacctgaggtcaggagttcgagaccagactggccaacatggtgaaaccccgtctctgagccgagatggagccattgcactccagcctgggtgacagggtgagactgtctcaaaaaaaacaaaaacaaaaacaaaataaaacctctctacatgccaagtgaaaggtggaagtgggggtgagacagaaatctgggagaccaagagacacggttgatgtgggggtgggggaagggcttgggtagaggagaagcttggatcagggagaacaaggaactgagaaagaggaattccacgtggtcgaatgcaaaagacttggaggctgtaagcgggggcagagtgaagataaatggtacacatctaggaagacacccaggtctgtggcctggttgactgagtggacggcagagctagccctaaggtggggatgcaagagaggtggaggatttggtgtaagacgtcaatttcattgtaggattcttttttctttcttttttttttttttttagagagactgagtctgactctgtcccccaggctttagtgcagtgatgtgaattcatagcagtcttgatctcctgggctcaaacgatcctcccacctcagcctcccaaagtgctgggattctcggattccaggcatgagccaccatgcccgaaccattgtaggatttttttttttaagtgtgagatgcccttgggacactctagggagaaatcgtagaggccattgactacatgagactagaaagatctatgatggggctgggtggcttcagcagacatggggagcactggctatgagtaggagctgttgggatcagggggagactttgggttacgagtggatcactgggacactggggcaccgtggggatcaatacaatttgggaatcagaggtaggttttggaggacaagtgaggttgttgaaaataagaaaatcatggaaatatacattggaggttggtggaaaatatgaaggatgtttggagttagcattaatcaatagtgggtcagaggaagtcctctgagttgtgtggggacacagggatttggtgggtcaccaagggtggggaagaatggtagcagatgctgtggtcattcagggatttgaatatgtcagtgggaaacactggaggtcaggggagtgtatattgggcgtctaaggagagaccagggtcacttggggttggctgtgacttcatgggaaggctggactatggatgagggcttctttgtcgtgggggaaaaaaaaaaaaaaatccctccgttgctaggcaaacgttcccagggcgcggttgctaaggacttgagctttctaactggccacgcctctttccattgcgggctccgcccccgcagccaaccacaagtcggtcacaggctcaaaggccgcgcccaccttctcgccccgcccacagtcccagcaccgttacccgagcgaccgcggggattcgtcccgcctccggatctgggtgccaatcgaagaggcgttgcccgggcgacgaccccaccttttccggcgcgggccagcggcttccgggagggggcccggctgcgggcggcagtccggcagtggcggggcccggggggcgcccaagatggcggcgggcggcgcggagggcggctcgggccccggcgccgccatgggggactgcgcggagattaagtcgcaattccgcacgcgcgagggtttctacaagctactcccgggcgacggcgccgctcgcaggtcgggtccggcttccgcccagactccggtgccgcctcagccaccgcagcccccgcccggccctgcctccgcctccggtcccggcgctgcaggccccgcgtcgtccccgccgcccgcaggccccggacccgggcccgccctgcccgccgtgcgcctcagcctcgtgcgcctcggggagccggacagcgccggggccggggagccgcccgccacgcccgcggggctgggctcggggggagaccgcgtctgcttcaacttgggccgtgagctctatttctacccaggctgctgtcgtcgtgggagccaacgggtgagcggcctgcatcgtggggccctgggtgctgaaaggatggaggttccagagaactgataggagggtccccgaattgatatggggccctgagataggcattctaaatgtgatggacgttgtagggcgacagcattggagggagtacaggattctgaaatgtgatgagaggcccgcggggtgctgggcaggcatcttggaggtgatgggggaaatcccctttacccccgttatgcgtaggagttctgggatggtgactattggacatgatggggtatctgagatgaggtgggatcccccgggttctggggtggcaggcattctgcaggtaatggggaatcatgaggtgatgcaagcccagaggtgatggagaacccagtattgcagcctggaggtgtgggagaggggtcttgagattgagcccaggaatgaggagaagtctagaagtgatgggggccttgaaggtgataggggatccagaagctgaatgggattctagagaaaattggggtctggaagtcatgagggtcctggaggagatgagcgtccggaagctgatgggagctctcaagggaatgagaggccctggcaggggaatctgcaggtgtgattcaggacatctctaaagcgatgtggtgagaaccctggccgtttatggtgatcccagaaatgatggggatccttcggagcccctaggtaataaatgggcctaaaatgtgggagaccgtgaggtttgacgggtcccagaactgtggcggtttagggactacaaagtgaagagaatgctaggatgttaggctttagagtcctggaaatttgggtgacctcaaggtttgggggtcttggaatagtgtggtactaggtcccaagggagttgctgaggttataggatggagtggtgaggctaaaaggaatcggagcttaggaactgtgtggacccagaaccctgattatgtggacaagggtgtctctgaattagaggtgacccaactttggggaggcactgtggtcaagggggatccttaccatcttttttgctactcttgtctgtgatttgggtccccttcccgtctgtggttgccccgtccttcgcaatccacctactcacctccccacttccctctgggttctaaccctgcttcctcttagtggtttcccccaacctcaacatcctcttccttctcctcagtggcatacaccattaactccttttctcccacccctcaagtccattgacctcaacaagccaattgacaagcggatctacaagggcacccagcccacctgccacgatttcaaccagttcactgctgccaccgagaccatctcgctgctggtgggcttctcagcgggtcaagtgcagtacctggatctcatcaaaaaggacaccagcaagctgttcaatgaggaggtgattgcagcccccagagcccccaacttctctgccttctcacctacccactatatgccattaggatgcagctgcctgcggaacagtgtaggcctgagaggggcaggaccagggagagatggagaatggggtgacagcagctaatgacagctgcctttactgtacccaggccctgtgctgtgttacccttgtgctgaatactttactccttgggttttctttctttctttctttcttttatttatttattttgagatggagtctcaccctgtcacccaggctggagtgcagtggcgcgatctctgctcactgcaagatccacctcccgggttcatgccattctcctgcctcagcctcctgagtagctgggacttcaggcacctgctgccacgcccgcctaatttattgtagttttagtggagatggggtttcaccgtgttagtcaggatggtctcgatctcctgacctcgtgatctgcccacctcggcctcccaaagtggtgggattacaggtgtgagccaccatgcccggttcttttttttttttttaattgtaattgtaatttttattgtttttaattttttttttctttttaaggcggagtctcactctgtcgcccaggctggagtgcagtggtacaatctcgggtcactgcaacctccgcctcccaggttcaagcaattctcctgcctcagcctcctgagtagctgggactacaggtgcgcactatcatacctggctaatttttttttttgagatggagtctcgctctgtcgcccaggctggagtgcagtggcgcgatctcggctcactgcaacctctgcctcccgggttcacgccattcttctgtctcagcctccccagcagctgggactacaggcgcccagcaccacgcccagctaatttttttgtatttttagtagagacgggatttcaccgtgttagtcaggatagtctcgatctcctgacctcgtgatctgcccgcctcggcctcccaaagtgctggaattaaaggcgtgagccaccacacccggccaatttttgtatttttggtagagatggggtttcaccatgttggccaggctggtctcaaacacctgaccttgtgatccgcccacctcggcctcccgaagtgctgggattacaggcatgagccaccgcgcccggccattctttgagttttcatcaaccagtggatacagaagtgtgctgcccattttgcagattagagaattgaggctagtaaataagtcgggacttagttgatgcccttgctctttgagttctgggctctggaggctttggattcaaagccctgctgcaccatttactcatcatgtgactttgggaaggtgaccattctctgagcctcacttctcctcctctgcaaaatgggattccagttcctaccttgcaggaccgctgttgtagaatcatacatggagattgctcagtcctgggccaacttggcctacgaggagataccagtaaacgaccttatccgcgggcagggactgctcttggcttctgtctcattctctctggtccagaggaggtgttccataaatattctcagaatgagtgaatggctgaagggagtgaacggaacagtcagtggattaaaaattcattagctcatccattcacaaatagtttttgagcatccgttctgtgccaggcaccgttcccagcactagggatatcacatctcagggccctggacaggaggccctgcccttttggagctttcagtctagctggggagacagacagttaatcaagttaagtcttcgtgtgtcagcaggtgattaaggcctgtttagaagaagcagtggggaaggggctgagggaagcttggagagtttagtagggtggtcaggaaagccctcactaagaggtgatactgaaataaagacctgaaggaggcaggtgagaagagttgcctggggaagggcatttttttttttttttttcctgagatagggtctcactctgtcgtccatgctggagtgcagtggtacgatcttcgttcactgcaacctccgcctcccaggctcaagcagtcctcccatatcagcctcctgagtagctgggactacatgcatgcaccaccacaactggctaacttttgtattttttgtagaggcggggtctctttgtgttgcccaagctggtctcgaactcctgggctcaagctattctcctgctttggcctcccaaagcgctgggattataggcgtgagccatcacacccagccaagaaggacattctgagtatcggggccagctaggacaaatgcaggattgcacagaagccgtgtggccagtgcagttactgagggagagaagatggtagatgagttccaagaaataacggaggggctggctcatggagagtctggaaggtcacggagagattttgccttactcttagttggaagcctgtggaggagcctttctcattggggctcacctgagccctggaaggcagaagtgactagagtgattatttgttcagttctcccagggatgggaggcacctcatcctgggagagcagctccttagttgcatacactggctgcctgagagcattagggcctcaggctctggaaccctgcttgagagaggctgcgaagtgttcagagcaggacagtgccaggtgctggctgatacttcacagagcatcgctgtggcggctgcagaggacagacaggcccaggcattggagcctgaggccagtcacacagcattgcaggcttggggtggttgaatgggatggtgagaggaggtcagattctgggtgtattttttcttttttttttattttgaggtggagtctcgctctgtcgcccaggctggagtacagtggcatgatctcccctcactgcaacctccgcctcccgggttcaagcaattctgcctcagcctcctgagtagctgggactataggcgcccgccaccatgcctggctaatttttgtatttttagtagagattttgtatctctacttgtatttcaccatattggctaggctggtctggaactcctgactttgtgatccgcctgcctcagcctcccaaagtgctgggattacaggcgtgagccaccacgcccagccacttctgggtgtattttgaaggtcgagcccacaggatttgtggaaggattggatgaggaaaagaggggcagatgccgaggttttttgtctaagcacctagcgggatggggggttgtcactcatttgtccaggaattaccttcaagctgcctcctgtgtgcactgctttaaagaatagtgaaccaaacaaagatcgcttcctttggggagctgcctttccgtgaagaaatttcctacttgaagcctgacgtagtaaagatcgggggagggttagacagatacagtggtccccaaccattttggcaccagggactggtcttatggaagacagtttttccacagactgttggggggatggttttgggatgaaaccgttctgcctctgatcatcaggtgttagattctaataaggagcgcacacctagatccctcgcatgcatagttcatggtggggttcgcactcttacgaggattgaatggtgcgctgctccggtaggaggctgggctcaggctgtaatgcctgctcgcccaccactcacctcctgctgcatggcctggttcctaacaggccacggaccactactgttccatggcccggaggttgaggaccccgagatacaggacaattctgtggcaagcaggactgtcccctcgccaaagatgggacatcgaggctccttggagcaccctgtggccaccttgcagcagcctctgtttccccatgtttccatgacctggtgtccatctgtcttccccagtttgggagcttctctccgaggaggacctgggcctggtgtggcacctgctgtgtgagcggggccatgtccaacggccttcttggggactttgggtcggggagaagttctgcctgggttttactgccttctcccaaccccacactgtctcccctggcagcggttgatcgacaagaccaaggtgacatatctgaagtggctgcctgagtcggagagcctgttcctggcatcacacgccagtggccacctgtacctgtacaacgtcagccacccctgcgcctcggccccgccccagtacagcctgctgaagcagggcgagggcttctctgtctatgctgccaagagcaaggcaccccgcaacccgctggccaagtgggcggtgggtgaggggcccctcaacgagttcgccttctcgcccgatggccggcacctggcctgtgtgagccaggatggctgcctgcgcgtcttccacttcgactccatgctcctgcgtgggctcatgaagagctactttgggggcctgctgtgtgtgtgctggagccctgacggccgctacgtggtgacgggtggcgaagatgacctggtcaccgtgtggtccttcaccgagggccgcgtggtggctcgaggccatggccacaagtcctgggtcaacgctgtggcctttgacccctacaccacaagggcagaggaggcggcgacagcagccggtgctgatggggagcggagcggcgaagaggaggaggaggagcccgaggctgcgggcacaggctcggccgggggcgccccgctctctccactgcccaaggctggctccattacttaccgctttggctcggcgggccaggacacgcagttctgcctgtgggacctcactgaagacgtgctctacccgcacccccccctggcccgcacccgcaccctccctggcacacctggcaccacgccaccggccgccagcagctcgaggggtggcgagcctggcccaggccccctgcctcgctcgctgtcccgctccaacagtctcccgcacccagctggcgggggcaaggcgggcggcccgggtgtggcggcagagcctggcacaccattcagcattggccgcttcgccacgctcacactgcaggagcggcgggaccggggggcagagaaggagcacaagcgctaccacagcctgggcaacatcagccggggtggcagtggcggcagtggcagtggtggggagaagcccagcggccctgttccccgcagccgcctggaccccgccaaggtgctgggcactgcgctgtgcccgcgcatccacgaggtgcccctgctggagccccttgtgtgcaagaagatcgcccaggagcggctcacagtcctcctgttcctggaggactgcatcatcactgcctgccaggagggcctcatctgcacctgggcccggccgggcaaggcggtgagtggccccacaccagcctgccggggacctggcaggacctttcgtgggaagaggcaggcattggcagagagagggctttgttgctgtcacagcctctggctccgtggggtgaggggaagccagggaaatcttagtgtctcagtacaagacctctcagatccttagagtgagggggtctagccctaggcagcaggcagcagaaagaggggtgggtgtgagagccagctaggaattggggcatccaaggctggccgtctgaagggcagcagatgggccccacatggccaggtcttactgcctgtcactcgaaccagaatctatttctgttgaacatctgttttttaaatcgtgaaacttttttgagtacttcaggccaaaactaggggcgagctcaagcctgtgggcatggctgccagcctgggtctgggactcaggatctgagcctcctgctgaaggcacaggctgggaatcccaggcctgggttccagtcccactccctctgtgaccctggacaagtcactgccccctctgacctccaactcatcacctcttagaacagagcctgtaggatgggcagtgggtggatgtgcttgcctcctgggtgggctgtggcgttgggaaggtcatagtaggcgaatcaggcctggcatcttgtaagttcggagctcgtcttgggtgtctcagcttcttagggcttggactcagttgcccagggtcctggaggccgtggcttggttcctcagatcctcagttttggaatcgtagagtcctgagtccctagaacttgagagcacagtctgagtgactcagaggcaagagtggtgggatttggggagtctggttgagtcctaaaagagacccctctgtctccgtagttcacagacgaggagaccgaggcccagacaggggaaggaagttggcccaggtcacccagcaagtcagtggtagaggtaggactgtccctgagttctttccccagcacctcagggtccctcccaagttagaagggagctccagtttccccctcccctcccacccttacccttaccccatggtctcactcaggatccgccaaggactttgattattgcgtgaaagtgctgactgccaggacaggaagctagctaagatgcaagttcccagcctagagcagtggcctctggggggtctagggcggacccaagggcaaggccagggtggcagcagctttggggactctgggctggctccctccccttgacactggctgaagcccaggtggtctctaacccctcccatctctccctctcatcttccccagggcatctcctcccaaccaggcaactccccgagtggcacagtggtgtgaagccatggatatcgggcccccccaaccccatgcccccagcctcctagccataaccctccctgctgacctcacagatcaacgtattaacaagactaaccatgatggatggactgctccagtccccccacctgcacaaaatttgggggccccccagactggcccggacacgggcgatgtaatagcccttgtggcctcagccttgtcccccacccactgccaagtacaatgacctcttcctctgaaacatcagtgttaccctcatccctgtccccagcatgtgactggtcactcctggggagagactccccgcccctgccacaagagccccaggtctgcagtgtgcccctcagttgagtgggcagggccgggggtggtccagccctcgcccggcccccaccccagctgcccttgctattgtctgtgcttttgaagagtgttaaattatggaagcccctcaggttcctccctgtcccgcaggacctcttatttatactaaagttccctgttttctcagcgggtctgtccccttcggaggagatgatgtagaggacctgtgtgtgtactctgtggttctaggcagtccgctttccccagaggaggagtgcaggcctgctcccagcccagcgcctcccaccccttttcatagcaggaaaagccggagcccagggagggaacggacctgcgagtcacacaactggtgacccacaccagcggctggagcaggaccctcttggggagaagagcatcctgcccgcagccagggcccctcatcaaagtcctcggtgttttttaaattatcagaactgcccaggaccacgtttcccaggccctgcccagctgggactcctcggtccttgcctcctagtttctcaggcctggccctctcaaggcccaggcaccccaggccggttggaggccccgacttccactctggagaaccgtccaccctggaaagaagagctcagattcctcttggctctcggagccgcagggagtgtgtcttcccgcgccaccctccaccccccgaaatgtttctgtttctaatcccagcctgggcaggaatgtggctccccggccaggggccaaggagctattttggggtctcgtttgcccagggagggcttggctccaccactttcctcccccagcctttgggcagcaggtcacccctgttcaggctctgagggtgccccctcctggtcctgtcctcaccaccccttccccacctcctgggaaaaaaaaaaaaaaaaaaaaaaaaagctggtataaagcagagagcctgagggctaaatttaactgtccgagtcggaatccatctctgagtcacccaagaagctgccctggcctcccgtccccttcccaggcctcaacccctttctcccacccagccccaacccccagccctcaccccctagcccccagttctggagcttgtcgggagcaagggggtggttgctactgggtcactcagcctcaattggccctgtttcagcaatgggcaggttcttcttgaaattcatcacacctgtggcttcctctgtgctctacctttttattggggtgacagtgtgacagctgagattctccatgcattccccctactctagcactgaagggttctgaagggccctggaaggagggagcttggggggctggcttgtgaggggttaaggctgggaggcgggaggggggctggaccaaggggtggggagaaggggaggaggcctcggccggccgcagagagaagtggccagagaggcccaggggacagccagggacaggcagacatgcagccagggctccagggcctggacaggggctgccaggccctgtgacaggaggaccccgagcccccggcccggggaggggccatggtgctgcctgtccaacatgtcagccgaggtgcggctgaggcggctccagcagctggtgttggacccgggcttcctggggctggagcccctgctcgaccttctcctgggcgtccaccaggagctgggcgcctccgaactggcccaggacaagtacgtggccgacttcttgcagtggggtgagtgcctaccctcggggctcctgcagatggggtgggggtggggcaggagacaggtctgggcacagaggcctggctgttgggggggcaggatggcaggatgggcatggggagatcctcccatcctggggctcagagtgtggacctgggccctggggcaacatttctctgtcctatgccaccactctggaggggcagagtaaggtcagcagaggctagggtggctgtgactcagagccatggcttaggagtcacagcaggctaggctgccaacagcctcccatggcctctctgcaccccgcctcagggtcagggtcagggtcatgctgggagctccctctcctaggaccctccccccaaaagtgggctctatggccctctcccctggtttcctgtggcctggggcaagccaggagggccagcatggggcagctgccaggggcgcagccgacaggcaggtgttcggcgccagcctctccagctgccccaacaggtgcccaggcactgggagggcggtgactcacgcgggccctgtgggagaaccagctttgcagacaggcgccaccagtgccccctcctctgcgatccaggagggacaactttgggttcttctgggtgtgtctccttcttttgtaggttctgcacccacccccacccccagccccaaagtctcggttcctatgagccgtgtgggtcagccaccattcccgccaccccgggtccctgcgtcctttagttctcctggcccagggcctccaaccttccagctgtcccacaaaaccccttcttgcaagggctttccagggcctggggccagggctggaaggaggatgcttccgcttctgccagctgccttgtctgcccacctcctccccaagcccaggactcgggctcactggtcactggtttctttcattcccagcaccctgcccctctggccctcatatgtctggccctcagtgactggtgtttggtttttggcctgtgtgtaacaaactgtgtgtgacacttgtttcctgtttctccgccttcccctgcttcctcttgtgtccatctctttctgacccaggcctggttcctttccctcctcctcccatttcacagatgggaaggtggaggccaagaagggccaggccattcagcctctggaaaaaccttctcccaacctcccacagcccctaatgactctcctggcctccctttagtagaggatgaagttgggttggcagggtaaactgagaccgggtggggtaggggtctggcgctcccgggaggagcactccttttgtggcccgagctgcatctcgcggcccctcccctgccaggcctggggcgggggagggggccagggttcctgctgccttaaaagggctcaatgtcttggctctctcctccctcccccgtcctcagccctggctggttcgtccctgctggcccactctcccggaaccccccggaacccctctctttcctccagaacccactgtctcctctccttccctcccctcccatacccatccctctctccatcctgcctccacttcttccacccccgggagtccaggcctccctgtccccacagtccctgagccacaagcctccaccccagctggtcccccacccaggctgcccagtttaacattcctagtcataggaccttgacttctgagaggcctgattgtcatctgtaaataaggggtaggactaaagcactcctcctggaggactgagagatgggctggaccggagcacttgagtctgggatatgtgaccatgctacctttgtctccctgtcctgttccttcccccagccccaaatccagggttttccaaagtgtggttcaagaaccacctgcatctgaatctagaggtactggatacaaccccacgtctgggccgttacccaggacattctacatgagaacgtgggggtggggccctggctgcacctgaactgtcacctggagtcagggtggaaggtggaagaactgggtcttatttccttctccccttgttctttagggtctgtccttctgcagactccgttaccccaccctaaccatcctgcacacccttggagccctctgggccaatgccctgtcccgcaaagggcttctcaggcatctcacctctatgggagggcatttttggcccccagaaccttacacggtgtttatgtggggaagcccctgggaagcagacagtcctagggtgaagctgagaggcagagagaaggggagacagacagagggtggggctttcccccttgtctccagtgccctttctggtgaccctcggttcttttcccccaccacccccccagcggagcccatcgtggtgaggcttaaggaggtccgactgcagagggacgacttcgagattctgaaggtgatcggacgcggggcgttcagcgaggtaagccgaaccgggcgggagcctgacttgactcgtggtgggcggggcataggggttggggcggggccttagaaattgatgaatgaccgagccttagaacctagggctgggctggaggcggggcttgggaccaatgggcgtggtgtggcaggtggggcggggccacggctgggtgcagaagcgggtggagttgggtctgggcgagcccttttgttttcccgccgtctccactctgtctcactatctcgacctcaggtagcggtagtgaagatgaagcagacgggccaggtgtatgccatgaagatcatgaacaagtgggacatgctgaagaggggcgaggtgaggggctgggcggacgtggggggctttgaggatccgcgccccgtctccggctgcagctcctccgggtgccctgcaggtgtcgtgcttccgtgaggagagggacgtgttggtgaatggggaccggcggtggatcacgcagctgcacttcgccttccaggatgagaactacctggtgagctccgggccggggtgactaggaagagggacaagagcccgtgctgtcactggacgaggaggtggggagaggaagctctaggattgggggtgctgcccggaaacgtctgtgggaaagtctgtgtgcggtaagagggtgtgtcaggtggatgaggggccttccctatctgagacggggatggtgtccttcactgcccgtttctggggtgatctgggggactcttataaagatgtctctgttgcggggggtctcttacctggaatgggataggtcttcaggaattctaacggggccactgcctagggaaggagtgtctgggacctattctctgggtgttgggtggcctctgggttctctttcccagaacatctcagggggagtgaatctgcccagtgacatcccaggaaagtttttttgtttgtgtttttttttgaggggcgggggcgggggccgcaggtggtctctgatttggcccggcagatctctatggttatctctgggctggggctgcaggtctctgcccaaggatggggtgtctctgggaggggttgtcccagccatccgtgatggatcagggcctcaggggactaccaaccacccatgacgaaccccttctcagtacctggtcatggagtattacgtgggcggggacctgctgacactgctgagcaagtttggggagcggattccggccgagatggcgcgcttctacctggcggagattgtcatggccatagactcggtgcaccggcttggctacgtgcacaggtgggtgcagcatggccgaggggatagcaagcttgttccctggccgggttcttggaaggtcagagcccagagaggccagggcctggagagggaccttcttggttggggcccaccggggggtgcctgggagtaggggtcagaactgtagaagccctacaggggcggaacccgaggaagtggggtcccaggtggcactgcccggaggggcggagcctggtgggaccacagaagggaggttcatttatcccacccttctcttttcctccgtgcagggacatcaaacccgacaacatcctgctggaccgctgtggccacatccgcctggccgacttcggctcttgcctcaagctgcgggcagatggaacggtgagccagtgccctggccacagagcaactggggctgctgatgagggatggaaggcacagagtgtgggagcgggactggatttggaggggaaaagaggtggtgtgacccaggcttaagtgtgcatctgtgtggcggagtattagaccaggcagagggaggggctaagcatttggggagtggttggaaggagggcccagagctggtgggcccagaggggtgggcccaagcctcgctctgctccttttggtccaggtgcggtcgctggtggctgtgggcaccccagactacctgtcccccgagatcctgcaggctgtgggcggtgggcctgggacaggcagctacgggcccgagtgtgactggtgggcgctgggtgtattcgcctatgaaatgttctatgggcagacgcccttctacgcggattccacggcggagacctatggcaagatcgtccactacaaggtgagcacggccgcagggagacctggcctctcccggtaggcgctcccaggctatcgcctcctctccctctgagcaggagcacctctctctgccgctggtggacgaaggggtccctgaggaggctcgagacttcattcagcggttgctgtgtcccccggagacacggctgggccggggtggagcaggcgacttccggacacatcccttcttctttggcctcgactgggatggtctccgggacagcgtgcccccctttacaccggatttcgaaggtgccaccgacacatgcaacttcgacttggtggaggacgggctcactgccatggtgagcgggggcggggtaggtacctgtggcccctgctcggctgcgggaacctccccatgctccctccataaagttggagtaaggacagtgcctaccttctggggtcctgaatcactcattccccagagcacctgctctgtgcccatctactactgaggacccagcagtgacctagacttacagtccagtgggggaacacagagcagtcttcagacagtaaggccccagagtgatcagggctgagacaatggagtgcagggggtgggggactcctgactcagcaaggaaggtcctggagggctttctggagtggggagctatctgagctgagacttggagggatgagaagcaggagaggactcctcctcccttaggccgtctctcttcaccgtgtaacaagctgtcatggcatgcttgctcggctctgggtgcccttttgctgaacaatactggggatccagcacggaccagatgagctctggtccctgccctcatccagttgcagtctagagaattagagaattatggagagtgtggcaggtgccctgaagggaagcaacaggatacaagaaaaaatgatggggccaggcacggtggctcacgcctgtaaccccagcaatttggcaggccgaagtgggtggattgcttgagcccaggagttcgagaccagcctgggcaatgtggtgagacccccgtctctacaaaaatgttttaaaaattggttgggcgtggtggcgcatgcctgtatactcagctactagggtggccgacgtgggcttgagcccaggaggtcaaggctgcagtgagctgtgattgtgccactgcactccagcctgggcaacggagagagactctgtctcaaaaataagataaactgaaattaaaaaataggctgggctggccgggcgtggtggctcacgcctgtaatctcagcactttgggaggccgaggcgggtggatcacgaggtcaggagatcgagaccatcttggctaacacggtgaaaccccatctctcctaaaaatacaaaaaattagccaggcgtggtggcgggcgcctgtagtcccagctactcaggaggctgaggcaggagaatggcgtgaacccgggaggcagagtttgcagtgagccgagatcgtgccactgcactccagcctgggcgacagagcgagactctgtctcagaaaaaaaaaaaaaaaaaaaaaaaaataggctggaccgcggccgggcgctgtggctcatgcctgtaatcccagcactttgggagtccaaggccggtgggtcatgagatcaggagttttgagactaggctggccaacacggtgaaaccccgtctctactaaaaatacaagaaaattagctgggtgtggtctcgggtgcctgtaattccagttactggggaagctgaggcaggagaattgcttgaacctgggaggcagagtttgcagtgagccaagatcatgccactacactccagtctgggtgacagagtgagactctgtctcaaaaaaaaaaaaaaaaaaaagggttgggcaaggtggttcacgcctgtaatcccagaactttgggaggctgaggcaggcagatcactggaagtcaggagttcaagaccagcctggccaacatggtgaaaccctgtgtctactaaaaatacaaaatttagccaggcttggtggcgtatgcctgtaatgccagctactcaggaggctgaggcaggagaatcgcttgattgaacctgggaggcagagtttgcagtgggctggggttgtgccactgcactctaggctgggagacagcaagactccatctaaaaaaaaaaaacagaactgggctgggcacagtggcttatatttgtaatcccagcactttgggaggctgaggttggaggactgcttgagcccagagtttgggactacaacagctgaggtaggcggatcacttgaggtcagaagatggagaccagcctggccagcgtggcgaaaccccgtctctaccaaaaatataaaaaattagccaggcgtggtagagggcgcctgtaatctcagctactcaggacgctgaggcaggagaatcgcctgaacctgggaggcggaggttgcagtgagctgagattgcaccactgcactccagcctgggtaacagagcgagactccgtatcaaagaaaaagaaaaaagaaaaaatgctggaggggccactttagataagccctgagttggggctggtttggggggaacatgtaagccaagatcaaaaagcagtgaggggcccgccctgacgactgctgctcacatctgtgtgtcttgcgcaggagacactgtcggacattcgggaaggtgcgccgctaggggtccacctgccttttgtgggctactcctactcctgcatggccctcaggtaagcactgccctggacggcctccaggggccacgaggctgcttgagcttcctgggtcctgctccttggcagccaatggagttgcaggatcagtcttggaaccttactgttttgggcccaaagactcctaagaggccagagttggaggaccttaaattttcagatctatgtacttcaaaatgttagattgaattttaaaacctcagagtcacagactgggcttcccagaatcttgtaaccattaacttttacgtctgtagtacacagagccacaggacttcagaacttggaaaatatgaagtttagacttttacaatcagttgtaaaagaatgcaaattctttgaatcagccatataacaataaggccatttaaaagtattaatttaggcgggccgcggtggctcacgcctgtaatcctagcactttgggaggccaaggcaggtggatcatgaggtcaggagatcgagaccatcctggctaacacggtgaaaccccgtctctactaaaaatacaaaaaaattagccgggcatggtggcgggcgcttgcggtcccagctacttgggaggcgaggcaggagaatggcatgaacccgggaggcggagcttgcagtgagccgagatcatgccactgcactccagcctgggcgacagagcaagactccgtctcaaaaaaaaaaaaaaaaaagtatttatttaggccgggtgtggtggctcacgcctgtaattccagtgctttgggaggatgaggtgggtggatcacctgaggtcaggagttcgagaccagcctgaccaacgtggagaaacctcatctctactaaaaaacaaaattagccaggcgtggtggcatatacctgtaatcccagctactcaggaggctgaggcaggagaatcagaacccaggagggggaggttgtggtgagctgagatcgtgccattgcattccagcctgggcaacaagagtgaaacttcatctcaaaaaaaaaaaaaaaaaagtactaatttacaggctgggcatggtggctcacgcttggaatcccagcactttgggaggctgaagtggacggattgcttcagcccaggagttcaagaccagcctgagcaacataatgagaccctgtctctacaaaaaattgaaaaaatcgtgccaggcatggtggtctgtgcctgcagtcctagctactcaggagtctgaagtaggagaatcacttgagcctggagtttgaggcttcagtgagccatgatagattccagcctaggcaacaaagtgagacctggtctcaacaaaagtattaattacacaaataatgcattgcttatcacaagtaaattagaaaatacagataaggaaaaggaagttgatatctcgtgagctcaccagatggcagtggtccctggctcacacgtgtactgacacatgtttaaatagtggagaacaggtgtttttttggtttgtttttttccccttcctcatgctactttgtctaagagaacagttggttttctagtcagcttttattactggacaacattacacatactataccttatcattaatgaactccagcttgattctgaaccgctgcggggcctgaacggtgggtcaggattgaacccatcctctattagaacccaggcgcatgtccaggatagctaggtcctgagccgtgttcccacaggagggactgctgggttggaggggacagccacttcataccccagggaggagctgtccccttcccacagctgagtggggtgtgctgacctcaagttgccatcttggggtcccatgcccagtcttaggaccacatctgtggaggtggccagagccaagcagtctccccatcaggtcggcctccctgtcctgaggccctgagaagaggggtctgcagcggtcacatgtcaagggaggagatgagctgaccctagaacatgggggtctggaccccaagtccctgcagaaggtttagaaagagcagctcccaggggcccaaggccaggagaggggcagggcttttcctaagcagaggaggggctattggcctacctgggactctgttctcttcgctctgctgctccccttcctcaaatcaggaggtcttggaagcagctgcccctacccacaggccagaagttctggttctccaccagagaatcagcattctgtctccctccccactccctcctcctctccccagggacagtgaggtcccaggccccacacccatggaactggaggccgagcagctgcttgagccacacgtgcaagcgcccagcctggagccctcggtgtccccacaggatgaaacagtaagttggtggaggggagggggtccgtcagggacaattgggagagaaaaggtgagggcttcccgggtggcgtgcactgtagagccctctagggacttcctgaacagaagcagacagaaaccacggagagacgaggttacttcagacatgggacggtctctgtagttacagtggggcattaagtaagggtgtgtgtgttgctggggatctgagaagtcgatctttgagctgagcgctggtgaaggagaaacaagccatggaaggaaaggtgccaagtggtcaggcgagagcctccagggcaaaggccttgggcaggtgggaatcctgatttgttcctgaaaggtagtttggctgaatcattcctgagaaggctggagaggccagcaggaaacaaaacccagcaaggccttttgtcgtgagggcattagggagctggagggattttgagcagcagagggacataggttgtgttagtgtttgagcaccagccctctggtccctgtgtagatttagaggaccagactcagggatggggctgagggaggtagggaagggagggggcttggatcattgcaggagctatggggattccagaaatgttgaggggacggaggagtaggggataaacaaggattcctagcctggaaccagtgcccaagtcctgagtcttccaggagccacaggcagccttaagcctggtccccatacacaggctgaagtggcagttccagcggctgtccctgcggcagaggctgaggccgaggtgacgctgcgggagctccaggaagccctggaggaggaggtgctcacccggcagagcctgagccgggagatggaggccatccgcacggacaaccagaacttcgccaggtcgggatcggggccggggccggggccgggatgcgggccggtggcaacccttggcatcccctctcgtccggcccggacggactcaccgtccttacctccccacagtcaactacgcgaggcagaggctcggaaccgggacctagaggcacacgtccggcagttgcaggagcggatggagttgctgcaggcagagggagccacaggtgagtccctcatgtgtccccttccccggaggaccgggaggaggtgggccgtctgctccgcggggcgtgtatagacacctggaggagggaagggacccacgctggggcacgccgcgccaccgccctccttcgcccctccacgcgccctatgcctctttcttctccttccagctgtcacgggggtccccagtccccgggccacggatccaccttcccatgtaagacccctctctttcccctgcctcagacctgctgcccattctgcagatcccctccctggctcctggtctccccgtccagatatagggctcaccctacgtctttgcgactttagagggcagaagccctttattcagccccagatctccctccgttcaggcctcaccagattccctccgggatctccctagataacctccccaacctcgattcccctcgctgtctctcgccccaccgctgagggctgggctgggctccgatcgggtcacctgtcccttctctctccagctagatggccccccggccgtggctgtgggccagtgcccgctggtggggccaggccccatgcaccgccgccacctgctgctccctgccagggtacgtccggctgcccacgcccccctccgccgtcgcgccccgcgctccacccgccccttgccacccgcttagctgcgcatttgcggggctgggcccacggcaggagggcggatcttcgggcagccaatcaacacaggccgctaggaagcagccaatgacgagttcggacgggattcgaggcgtgcgagtggactaacaacagctgtaggctgttggggcgggggcggggcgcagggaagagtgcgggcccacctatgggcgtaggcggggcgagtcccaggagccaatcagaggcccatgccgggtgttgacctcgccctctccccgcaggtccctaggcctggcctatcggaggcgctttccctgctcctgttcgccgttgttctgtctcgtgccgccgccctgggctgcattgggttggtggcccacgccggccaactcaccgcagtctggcgccgcccaggagccgcccgcgctccctgaaccctagaactgtcttcgactccggggccccgttggaagactgagtgcccggggcacggcacagaagccgcgcccaccgcctgccagttcacaaccgctccgagcgtgggtctccgcccagctccagtcctgtgatccgggcccgccccctagcggccggggagggaggggccgggtccgcggccggcgaacggggctcgaagggtccttgtagccgggaatgctgctgctgctgctgctgctgctgctgctgctgctgctgctgctgctgctgctgctgctggggggatcacagaccatttctttctttcggccaggctgaggccctgacgtggatgggcaaactgcaggcctgggaaggcagcaagccgggccgtccgtgttccatcctccacgcacccccacctatcgttggttcgcaaagtgcaaagctttcttgtgcatgacgccctgctctggggagcgtctggcgcgatctctgcctgcttactcgggaaatttgcttttgccaaacccgctttttcggggatcccgcgcccccctcctcacttgcgctgctctcggagccccagccggctccgcccgcttcggcggtttggatatttattgacctcgtcctccgactcgctgacaggctacaggacccccaacaaccccaatccacgttttggatgcactgagaccccgacattcctcggtatttattgtctgtccccacctaggacccccacccccgaccctcgcgaataaaaggccctccatctgcccaaagctctggactccacagtgtccgcggtttgcgttgtgggccggaggctccgcagcgggccaatccggaggcgtgtggaggcggccgaaggtctgggaggagctagcgggatgcgaagcggccgaatcagggttgggggaggaaaagccacggggcggggctttggcgtccggccaataggagggcgagcgggccacccggaggcaccgcccccgcccagctgtggcccagctgtgccaccgagcgtcgagaagagggggctgggctggcagcgcgcgcggccatcctccttccactgcgcctgcgcacgccacgcgcatccgctcctgggacgcaagctcgagaaaagttgctgcaaactttctagcccgttccccgcccctcctcccggccagacccgccccccctgcggagccgggaattccgaggggcggagcgcaggccgagatggggaatgtgggggcctgcagaggaccctggagacggaggcgtgcagaagctcagtctcggggcggaggcttcgcgcccttagtcctcctggacggcccgttaccttctgcgttgtcccgatggggaaactgaggccctgagccagaagcacacgctggggggaggcagaaagcgcggccagaggcggagggaaaacaaagggagaatcacagacagacgggagggggacggacacacacaaggggacagagacccgagtggagagctggatctcgccttcccggcgtggggcgcagggtcggccagaaagaagatcgagaagagcggggagtgggggcgaaaaggggggacaggtgggggaggaggctggggaaagcccgagggaggaagagagggagggaggaacttcccaaagttgcaaaacatggctaccttgcctgcggagccgagcgcggggccggcggctgggggggaggcggtggcggcggcggcggcgaccgaagaggaggaggaggaagcgcgccagctcttgcagactttgcaggcggccgagggtgaggcggcggcggcggccggggccggggcgggcgcagcggctgcgggagctgagggcccgggatccccgggcgtccccgggtcgccccccgaggccgcttccgaaccgcccacgggcctccgcttctcgcccgagcaggtggcgtgcgtctgcgaggcgctgctccaggcgggccacgccggccgcttgagccgcttcctgggcgcactgcccccggccgagcgcctacgtggcagcgacccggtgttgcgcgcgcgggccctggtggccttccagcggggcgagtacgccgagctctaccggctactcgagagccgccccttccccgccgcccaccacgccttcctgcaggacctctacctgcgcgcgcgctaccatgaggccgagcgggcccgcggccgcgcgcttggcgcagtggacaagtatcgactgcgcaagaagttcccgctgcccaagaccatctgggacggcgaggagacagtctactgcttcaaggagcgctcccgcgcagcgctcaaggcctgctaccgcggcaaccgctaccccacgccggacgagaagcgccgcctggccacactcaccggcctgtcgctcacgcaggtcagcaactggttcaagaaccggcgacagcgcgaccggaccggggccggaggcggcgcgccctgcaagaggtgaggggcctcgggcggcgcaagtccagctctcccggggacatcccgtccaccagccctcttcccccgtgcccactgctggggccggcgcgccgaggtcctcggacatctcccgggaccagctcacaatctcaggcgcccgcggggcgcggggactaagtgtggacgggacaggcacccgcccgggccctctccccgcacgcgtctcctcttccagcggctccattccgagctccttcccaaatcccatcggtgttggggaatcacactgcggggggcactagagggactgaggaaaaaggacagggcctgtggccactccactccgcgtaggggctgcctcccagccccctttcttcactgaccgttactcttacccacccgcccccacactccctccgggcccggacggcgtggtccgtcttctgcctttgttgtgaaacgtgaacctttcccagctccggtttccctgtaacccaaacccttctcctcccaccctgagcgccggcctctccctt

SEQ ID NO: 2 - DNA, 2874 bp, Homo sapiens
  source 1..2874: mol_type = genomic DNA
aggggggctggaccaaggggtggggagaaggggaggaggcctcggccggccgcagagagaagtggccagagaggcccaggggacagccagggacaggcagacatgcagccagggctccagggcctggacaggggctgccaggccctgtgacaggaggaccccgagcccccggcccggggaggggccatggtgctgcctgtccaacatgtcagccgaggtgcggctgaggcggctccagcagctggtgttggacccgggcttcctggggctggagcccctgctcgaccttctcctgggcgtccaccaggagctgggcgcctccgaactggcccaggacaagtacgtggccgacttcttgcagtgggcggagcccatcgtggtgaggcttaaggaggtccgactgcagagggacgacttcgagattctgaaggtgatcggacgcggggcgttcagcgaggtagcggtagtgaagatgaagcagacgggccaggtgtatgccatgaagatcatgaacaagtgggacatgctgaagaggggcgaggtgtcgtgcttccgtgaggagagggacgtgttggtgaatggggaccggcggtggatcacgcagctgcacttcgccttccaggatgagaactacctgtacctggtcatggagtattacgtgggcggggacctgctgacactgctgagcaagtttggggagcggattccggccgagatggcgcgcttctacctggcggagattgtcatggccatagactcggtgcaccggcttggctacgtgcacagggacatcaaacccgacaacatcctgctggaccgctgtggccacatccgcctggccgacttcggctcttgcctcaagctgcgggcagatggaacggtgcggtcgctggtggctgtgggcaccccagactacctgtcccccgagatcctgcaggctgtgggcggtgggcctgggacaggcagctacgggcccgagtgtgactggtgggcgctgggtgtattcgcctatgaaatgttctatgggcagacgcccttctacgcggattccacggcggagacctatggcaagatcgtccactacaaggagcacctctctctgccgctggtggacgaaggggtccctgaggaggctcgagacttcattcagcggttgctgtgtcccccggagacacggctgggccggggtggagcaggcgacttccggacacatcccttcttctttggcctcgactgggatggtctccgggacagcgtgcccccctttacaccggatttcgaaggtgccaccgacacatgcaacttcgacttggtggaggacgggctcactgccatggtgagcgggggcggggagacactgtcggacattcgggaaggtgcgccgctaggggtccacctgccttttgtgggctactcctactcctgcatggccctcagggacagtgaggtcccaggccccacacccatggaactggaggccgagcagctgcttgagccacacgtgcaagcgcccagcctggagccctcggtgtccccacaggatgaaacagctgaagtggcagttccagcggctgtccctgcggcagaggctgaggccgaggtgacgctgcgggagctccaggaagccctggaggaggaggtgctcacccggcagagcctgagccgggagatggaggccatccgcacggacaaccagaacttcgccagtcaactacgcgaggcagaggctcggaaccgggacctagaggcacacgtccggcagttgcaggagcggatggagttgctgcaggcagagggagccacagctgtcacgggggtccccagtccccgggccacggatccaccttcccatctagatggccccccggccgtggctgtgggccagtgcccgctggtggggccaggccccatgcaccgccgccacctgctgctccctgccagggtccctaggcctggcctatcggaggcgctttccctgctcctgttcgccgttgttctgtctcgtgccgccgccctgggctgcattgggttggtggcccacgccggccaactcaccgcagtctggcgccgcccaggagccgcccgcgctccctgaaccctagaactgtcttcgactccggggccccgttggaagactgagtgcccggggcacggcacagaagccgcgcccaccgcctgccagttcacaaccgctccgagcgtgggtctccgcccagctccagtcctgtgatccgggcccgccccctagcggccggggagggaggggccgggtccgcggccggcgaacggggctcgaagggtccttgtagccgggaatgctgctgctgctgctgctgctgctgctgctgctgctgctgctgctgctgctgctgctgctggggggatcacagaccatttctttctttcggccaggctgaggccctgacgtggatgggcaaactgcaggcctgggaaggcagcaagccgggccgtccgtgttccatcctccacgcacccccacctatcgttggttcgcaaagtgcaaagctttcttgtgcatgacgccctgctctggggagcgtctggcgcgatctctgcctgcttactcgggaaatttgcttttgccaaacccgctttttcggggatcccgcgcccccctcctcacttgcgctgctctcggagccccagccggctccgcccgcttcggcggtttggatatttattgacctcgtcctccgactcgctgacaggctacaggacccccaacaaccccaatccacgttttggatgcactgagaccccgacattcctcggtatttattgtctgtccccacctaggacccccacccccgaccctcgcgaataaaaggccctccatctgcccaaagctctgga

SEQ ID NO: 3 - DNA, 19000 bp, Homo sapiens
  source 1..19000: mol_type = genomic DNA
cagctggcgggggcaaggcgggcggcccgggtgtggcggcagagcctggcacaccattcagcattggccgcttcgccacgctcacactgcaggagcggcgggaccggggggcagagaaggagcacaagcgctaccacagcctgggcaacatcagccggggtggcagtggcggcagtggcagtggtggggagaagcccagcggccctgttccccgcagccgcctggaccccgccaaggtgctgggcactgcgctgtgcccgcgcatccacgaggtgcccctgctggagccccttgtgtgcaagaagatcgcccaggagcggctcacagtcctcctgttcctggaggactgcatcatcactgcctgccaggagggcctcatctgcacctgggcccggccgggcaaggcggtgagtggccccacaccagcctgccggggacctggcaggacctttcgtgggaagaggcaggcattggcagagagagggctttgttgctgtcacagcctctggctccgtggggtgaggggaagccagggaaatcttagtgtctcagtacaagacctctcagatccttagagtgagggggtctagccctaggcagcaggcagcagaaagaggggtgggtgtgagagccagctaggaattggggcatccaaggctggccgtctgaagggcagcagatgggccccacatggccaggtcttactgcctgtcactcgaaccagaatctatttctgttgaacatctgttttttaaatcgtgaaacttttttgagtacttcaggccaaaactaggggcgagctcaagcctgtgggcatggctgccagcctgggtctgggactcaggatctgagcctcctgctgaaggcacaggctgggaatcccaggcctgggttccagtcccactccctctgtgaccctggacaagtcactgccccctctgacctccaactcatcacctcttagaacagagcctgtaggatgggcagtgggtggatgtgcttgcctcctgggtgggctgtggcgttgggaaggtcatagtaggcgaatcaggcctggcatcttgtaagttcggagctcgtcttgggtgtctcagcttcttagggcttggactcagttgcccagggtcctggaggccgtggcttggttcctcagatcctcagttttggaatcgtagagtcctgagtccctagaacttgagagcacagtctgagtgactcagaggcaagagtggtgggatttggggagtctggttgagtcctaaaagagacccctctgtctccgtagttcacagacgaggagaccgaggcccagacaggggaaggaagttggcccaggtcacccagcaagtcagtggtagaggtaggactgtccctgagttctttccccagcacctcagggtccctcccaagttagaagggagctccagtttccccctcccctcccacccttacccttaccccatggtctcactcaggatccgccaaggactttgattattgcgtgaaagtgctgactgccaggacaggaagctagctaagatgcaagttcccagcctagagcagtggcctctggggggtctagggcggacccaagggcaaggccagggtggcagcagctttggggactctgggctggctccctccccttgacactggctgaagcccaggtggtctctaacccctcccatctctccctctcatcttccccagggcatctcctcccaaccaggcaactccccgagtggcacagtggtgtgaagccatggatatcgggcccccccaaccccatgcccccagcctcctagccataaccctccctgctgacctcacagatcaacgtattaacaagactaaccatgatggatggactgctccagtccccccacctgcacaaaatttgggggccccccagactggcccggacacgggcgatgtaatagcccttgtggcctcagccttgtcccccacccactgccaagtacaatgacctcttcctctgaaacatcagtgttaccctcatccctgtccccagcatgtgactggtcactcctggggagagactccccgcccctgccacaagagccccaggtctgcagtgtgcccctcagttgagtgggcagggccgggggtggtccagccctcgcccggcccccaccccagctgcccttgctattgtctgtgcttttgaagagtgttaaattatggaagcccctcaggttcctccctgtcccgcaggacctcttatttatactaaagttccctgttttctcagcgggtctgtccccttcggaggagatgatgtagaggacctgtgtgtgtactctgtggttctaggcagtccgctttccccagaggaggagtgcaggcctgctcccagcccagcgcctcccaccccttttcatagcaggaaaagccggagcccagggagggaacggacctgcgagtcacacaactggtgacccacaccagcggctggagcaggaccctcttggggagaagagcatcctgcccgcagccagggcccctcatcaaagtcctcggtgttttttaaattatcagaactgcccaggaccacgtttcccaggccctgcccagctgggactcctcggtccttgcctcctagtttctcaggcctggccctctcaaggcccaggcaccccaggccggttggaggccccgacttccactctggagaaccgtccaccctggaaagaagagctcagattcctcttggctctcggagccgcagggagtgtgtcttcccgcgccaccctccaccccccgaaatgtttctgtttctaatcccagcctgggcaggaatgtggctccccggccaggggccaaggagctattttggggtctcgtttgcccagggagggcttggctccaccactttcctcccccagcctttgggcagcaggtcacccctgttcaggctctgagggtgccccctcctggtcctgtcctcaccaccccttccccacctcctgggaaaaaaaaaaaaaaaaaaaaaaaaagctggtataaagcagagagcctgagggctaaatttaactgtccgagtcggaatccatctctgagtcacccaagaagctgccctggcctcccgtccccttcccaggcctcaacccctttctcccacccagccccaacccccagccctcaccccctagcccccagttctggagcttgtcgggagcaagggggtggttgctactgggtcactcagcctcaattggccctgtttcagcaatgggcaggttcttcttgaaattcatcacacctgtggcttcctctgtgctctacctttttattggggtgacagtgtgacagctgagattctccatgcattccccctactctagcactgaagggttctgaagggccctggaaggagggagcttggggggctggcttgtgaggggttaaggctgggaggcgggaggggggctggaccaaggggtggggagaaggggaggaggcctcggccggccgcagagagaagtggccagagaggcccaggggacagccagggacaggcagacatgcagccagggctccagggcctggacaggggctgccaggccctgtgacaggaggaccccgagcccccggcccggggaggggccatggtgctgcctgtccaacatgtcagccgaggtgcggctgaggcggctccagcagctggtgttggacccgggcttcctggggctggagcccctgctcgaccttctcctgggcgtccaccaggagctgggcgcctccgaactggcccaggacaagtacgtggccgacttcttgcagtggggtgagtgcctaccctcggggctcctgcagatggggtgggggtggggcaggagacaggtctgggcacagaggcctggctgttgggggggcaggatggcaggatgggcatggggagatcctcccatcctggggctcagagtgtggacctgggccctggggcaacatttctctgtcctatgccaccactctggaggggcagagtaaggtcagcagaggctagggtggctgtgactcagagccatggcttaggagtcacagcaggctaggctgccaacagcctcccatggcctctctgcaccccgcctcagggtcagggtcagggtcatgctgggagctccctctcctaggaccctccccccaaaagtgggctctatggccctctcccctggtttcctgtggcctggggcaagccaggagggccagcatggggcagctgccaggggcgcagccgacaggcaggtgttcggcgccagcctctccagctgccccaacaggtgcccaggcactgggagggcggtgactcacgcgggccctgtgggagaaccagctttgcagacaggcgccaccagtgccccctcctctgcgatccaggagggacaactttgggttcttctgggtgtgtctccttcttttgtaggttctgcacccacccccacccccagccccaaagtctcggttcctatgagccgtgtgggtcagccaccattcccgccaccccgggtccctgcgtcctttagttctcctggcccagggcctccaaccttccagctgtcccacaaaaccccttcttgcaagggctttccagggcctggggccagggctggaaggaggatgcttccgcttctgccagctgccttgtctgcccacctcctccccaagcccaggactcgggctcactggtcactggtttctttcattcccagcaccctgcccctctggccctcatatgtctggccctcagtgactggtgtttggtttttggcctgtgtgtaacaaactgtgtgtgacacttgtttcctgtttctccgccttcccctgcttcctcttgtgtccatctctttctgacccaggcctggttcctttccctcctcctcccatttcacagatgggaaggtggaggccaagaagggccaggccattcagcctctggaaaaaccttctcccaacctcccacagcccctaatgactctcctggcctccctttagtagaggatgaagttgggttggcagggtaaactgagaccgggtggggtaggggtctggcgctcccgggaggagcactccttttgtggcccgagctgcatctcgcggcccctcccctgccaggcctggggcgggggagggggccagggttcctgctgccttaaaagggctcaatgtcttggctctctcctccctcccccgtcctcagccctggctggttcgtccctgctggcccactctcccggaaccccccggaacccctctctttcctccagaacccactgtctcctctccttccctcccctcccatacccatccctctctccatcctgcctccacttcttccacccccgggagtccaggcctccctgtccccacagtccctgagccacaagcctccaccccagctggtcccccacccaggctgcccagtttaacattcctagtcataggaccttgacttctgagaggcctgattgtcatctgtaaataaggggtaggactaaagcactcctcctggaggactgagagatgggctggaccggagcacttgagtctgggatatgtgaccatgctacctttgtctccctgtcctgttccttcccccagccccaaatccagggttttccaaagtgtggttcaagaaccacctgcatctgaatctagaggtactggatacaaccccacgtctgggccgttacccaggacattctacatgagaacgtgggggtggggccctggctgcacctgaactgtcacctggagtcagggtggaaggtggaagaactgggtcttatttccttctccccttgttctttagggtctgtccttctgcagactccgttaccccaccctaaccatcctgcacacccttggagccctctgggccaatgccctgtcccgcaaagggcttctcaggcatctcacctctatgggagggcatttttggcccccagaaccttacacggtgtttatgtggggaagcccctgggaagcagacagtcctagggtgaagctgagaggcagagagaaggggagacagacagagggtggggctttcccccttgtctccagtgccctttctggtgaccctcggttcttttcccccaccacccccccagcggagcccatcgtggtgaggcttaaggaggtccgactgcagagggacgacttcgagattctgaaggtgatcggacgcggggcgttcagcgaggtaagccgaaccgggcgggagcctgacttgactcgtggtgggcggggcataggggttggggcggggccttagaaattgatgaatgaccgagccttagaacctagggctgggctggaggcggggcttgggaccaatgggcgtggtgtggcaggtggggcggggccacggctgggtgcagaagcgggtggagttgggtctgggcgagcccttttgttttcccgccgtctccactctgtctcactatctcgacctcaggtagcggtagtgaagatgaagcagacgggccaggtgtatgccatgaagatcatgaacaagtgggacatgctgaagaggggcgaggtgaggggctgggcggacgtggggggctttgaggatccgcgccccgtctccggctgcagctcctccgggtgccctgcaggtgtcgtgcttccgtgaggagagggacgtgttggtgaatggggaccggcggtggatcacgcagctgcacttcgccttccaggatgagaactacctggtgagctccgggccggggtgactaggaagagggacaagagcccgtgctgtcactggacgaggaggtggggagaggaagctctaggattgggggtgctgcccggaaacgtctgtgggaaagtctgtgtgcggtaagagggtgtgtcaggtggatgaggggccttccctatctgagacggggatggtgtccttcactgcccgtttctggggtgatctgggggactcttataaagatgtctctgttgcggggggtctcttacctggaatgggataggtcttcaggaattctaacggggccactgcctagggaaggagtgtctgggacctattctctgggtgttgggtggcctctgggttctctttcccagaacatctcagggggagtgaatctgcccagtgacatcccaggaaagtttttttgtttgtgtttttttttgaggggcgggggcgggggccgcaggtggtctctgatttggcccggcagatctctatggttatctctgggctggggctgcaggtctctgcccaaggatggggtgtctctgggaggggttgtcccagccatccgtgatggatcagggcctcaggggactaccaaccacccatgacgaaccccttctcagtacctggtcatggagtattacgtgggcggggacctgctgacactgctgagcaagtttggggagcggattccggccgagatggcgcgcttctacctggcggagattgtcatggccatagactcggtgcaccggcttggctacgtgcacaggtgggtgcagcatggccgaggggatagcaagcttgttccctggccgggttcttggaaggtcagagcccagagaggccagggcctggagagggaccttcttggttggggcccaccggggggtgcctgggagtaggggtcagaactgtagaagccctacaggggcggaacccgaggaagtggggtcccaggtggcactgcccggaggggcggagcctggtgggaccacagaagggaggttcatttatcccacccttctcttttcctccgtgcagggacatcaaacccgacaacatcctgctggaccgctgtggccacatccgcctggccgacttcggctcttgcctcaagctgcgggcagatggaacggtgagccagtgccctggccacagagcaactggggctgctgatgagggatggaaggcacagagtgtgggagcgggactggatttggaggggaaaagaggtggtgtgacccaggcttaagtgtgcatctgtgtggcggagtattagaccaggcagagggaggggctaagcatttggggagtggttggaaggagggcccagagctggtgggcccagaggggtgggcccaagcctcgctctgctccttttggtccaggtgcggtcgctggtggctgtgggcaccccagactacctgtcccccgagatcctgcaggctgtgggcggtgggcctgggacaggcagctacgggcccgagtgtgactggtgggcgctgggtgtattcgcctatgaaatgttctatgggcagacgcccttctacgcggattccacggcggagacctatggcaagatcgtccactacaaggtgagcacggccgcagggagacctggcctctcccggtaggcgctcccaggctatcgcctcctctccctctgagcaggagcacctctctctgccgctggtggacgaaggggtccctgaggaggctcgagacttcattcagcggttgctgtgtcccccggagacacggctgggccggggtggagcaggcgacttccggacacatcccttcttctttggcctcgactgggatggtctccgggacagcgtgcccccctttacaccggatttcgaaggtgccaccgacacatgcaacttcgacttggtggaggacgggctcactgccatggtgagcgggggcggggtaggtacctgtggcccctgctcggctgcgggaacctccccatgctccctccataaagttggagtaaggacagtgcctaccttctggggtcctgaatcactcattccccagagcacctgctctgtgcccatctactactgaggacccagcagtgacctagacttacagtccagtgggggaacacagagcagtcttcagacagtaaggccccagagtgatcagggctgagacaatggagtgcagggggtgggggactcctgactcagcaaggaaggtcctggagggctttctggagtggggagctatctgagctgagacttggagggatgagaagcaggagaggactcctcctcccttaggccgtctctcttcaccgtgtaacaagctgtcatggcatgcttgctcggctctgggtgcccttttgctgaacaatactggggatccagcacggaccagatgagctctggtccctgccctcatccagttgcagtctagagaattagagaattatggagagtgtggcaggtgccctgaagggaagcaacaggatacaagaaaaaatgatggggccaggcacggtggctcacgcctgtaaccccagcaatttggcaggccgaagtgggtggattgcttgagcccaggagttcgagaccagcctgggcaatgtggtgagacccccgtctctacaaaaatgttttaaaaattggttgggcgtggtggcgcatgcctgtatactcagctactagggtggccgacgtgggcttgagcccaggaggtcaaggctgcagtgagctgtgattgtgccactgcactccagcctgggcaacggagagagactctgtctcaaaaataagataaactgaaattaaaaaataggctgggctggccgggcgtggtggctcacgcctgtaatctcagcactttgggaggccgaggcgggtggatcacgaggtcaggagatcgagaccatcttggctaacacggtgaaaccccatctctcctaaaaatacaaaaaattagccaggcgtggtggcgggcgcctgtagtcccagctactcaggaggctgaggcaggagaatggcgtgaacccgggaggcagagtttgcagtgagccgagatcgtgccactgcactccagcctgggcgacagagcgagactctgtctcagaaaaaaaaaaaaaaaaaaaaaaaaataggctggaccgcggccgggcgctgtggctcatgcctgtaatcccagcactttgggagtccaaggccggtgggtcatgagatcaggagttttgagactaggctggccaacacggtgaaaccccgtctctactaaaaatacaagaaaattagctgggtgtggtctcgggtgcctgtaattccagttactggggaagctgaggcaggagaattgcttgaacctgggaggcagagtttgcagtgagccaagatcatgccactacactccagtctgggtgacagagtgagactctgtctcaaaaaaaaaaaaaaaaaaaagggttgggcaaggtggttcacgcctgtaatcccagaactttgggaggctgaggcaggcagatcactggaagtcaggagttcaagaccagcctggccaacatggtgaaaccctgtgtctactaaaaatacaaaatttagccaggcttggtggcgtatgcctgtaatgccagctactcaggaggctgaggcaggagaatcgcttgattgaacctgggaggcagagtttgcagtgggctggggttgtgccactgcactctaggctgggagacagcaagactccatctaaaaaaaaaaaacagaactgggctgggcacagtggcttatatttgtaatcccagcactttgggaggctgaggttggaggactgcttgagcccagagtttgggactacaacagctgaggtaggcggatcacttgaggtcagaagatggagaccagcctggccagcgtggcgaaaccccgtctctaccaaaaatataaaaaattagccaggcgtggtagagggcgcctgtaatctcagctactcaggacgctgaggcaggagaatcgcctgaacctgggaggcggaggttgcagtgagctgagattgcaccactgcactccagcctgggtaacagagcgagactccgtatcaaagaaaaagaaaaaagaaaaaatgctggaggggccactttagataagccctgagttggggctggtttggggggaacatgtaagccaagatcaaaaagcagtgaggggcccgccctgacgactgctgctcacatctgtgtgtcttgcgcaggagacactgtcggacattcgggaaggtgcgccgctaggggtccacctgccttttgtgggctactcctactcctgcatggccctcaggtaagcactgccctggacggcctccaggggccacgaggctgcttgagcttcctgggtcctgctccttggcagccaatggagttgcaggatcagtcttggaaccttactgttttgggcccaaagactcctaagaggccagagttggaggaccttaaattttcagatctatgtacttcaaaatgttagattgaattttaaaacctcagagtcacagactgggcttcccagaatcttgtaaccattaacttttacgtctgtagtacacagagccacaggacttcagaacttggaaaatatgaagtttagacttttacaatcagttgtaaaagaatgcaaattctttgaatcagccatataacaataaggccatttaaaagtattaatttaggcgggccgcggtggctcacgcctgtaatcctagcactttgggaggccaaggcaggtggatcatgaggtcaggagatcgagaccatcctggctaacacggtgaaaccccgtctctactaaaaatacaaaaaaattagccgggcatggtggcgggcgcttgcggtcccagctacttgggaggcgaggcaggagaatggcatgaacccgggaggcggagcttgcagtgagccgagatcatgccactgcactccagcctgggcgacagagcaagactccgtctcaaaaaaaaaaaaaaaaaagtatttatttaggccgggtgtggtggctcacgcctgtaattccagtgctttgggaggatgaggtgggtggatcacctgaggtcaggagttcgagaccagcctgaccaacgtggagaaacctcatctctactaaaaaacaaaattagccaggcgtggtggcatatacctgtaatcccagctactcaggaggctgaggcaggagaatcagaacccaggagggggaggttgtggtgagctgagatcgtgccattgcattccagcctgggcaacaagagtgaaacttcatctcaaaaaaaaaaaaaaaaaagtactaatttacaggctgggcatggtggctcacgcttggaatcccagcactttgggaggctgaagtggacggattgcttcagcccaggagttcaagaccagcctgagcaacataatgagaccctgtctctacaaaaaattgaaaaaatcgtgccaggcatggtggtctgtgcctgcagtcctagctactcaggagtctgaagtaggagaatcacttgagcctggagtttgaggcttcagtgagccatgatagattccagcctaggcaacaaagtgagacctggtctcaacaaaagtattaattacacaaataatgcattgcttatcacaagtaaattagaaaatacagataaggaaaaggaagttgatatctcgtgagctcaccagatggcagtggtccctggctcacacgtgtactgacacatgtttaaatagtggagaacaggtgtttttttggtttgtttttttccccttcctcatgctactttgtctaagagaacagttggttttctagtcagcttttattactggacaacattacacatactataccttatcattaatgaactccagcttgattctgaaccgctgcggggcctgaacggtgggtcaggattgaacccatcctctattagaacccaggcgcatgtccaggatagctaggtcctgagccgtgttcccacaggagggactgctgggttggaggggacagccacttcataccccagggaggagctgtccccttcccacagctgagtggggtgtgctgacctcaagttgccatcttggggtcccatgcccagtcttaggaccacatctgtggaggtggccagagccaagcagtctccccatcaggtcggcctccctgtcctgaggccctgagaagaggggtctgcagcggtcacatgtcaagggaggagatgagctgaccctagaacatgggggtctggaccccaagtccctgcagaaggtttagaaagagcagctcccaggggcccaaggccaggagaggggcagggcttttcctaagcagaggaggggctattggcctacctgggactctgttctcttcgctctgctgctccccttcctcaaatcaggaggtcttggaagcagctgcccctacccacaggccagaagttctggttctccaccagagaatcagcattctgtctccctccccactccctcctcctctccccagggacagtgaggtcccaggccccacacccatggaactggaggccgagcagctgcttgagccacacgtgcaagcgcccagcctggagccctcggtgtccccacaggatgaaacagtaagttggtggaggggagggggtccgtcagggacaattgggagagaaaaggtgagggcttcccgggtggcgtgcactgtagagccctctagggacttcctgaacagaagcagacagaaaccacggagagacgaggttacttcagacatgggacggtctctgtagttacagtggggcattaagtaagggtgtgtgtgttgctggggatctgagaagtcgatctttgagctgagcgctggtgaaggagaaacaagccatggaaggaaaggtgccaagtggtcaggcgagagcctccagggcaaaggccttgggcaggtgggaatcctgatttgttcctgaaaggtagtttggctgaatcattcctgagaaggctggagaggccagcaggaaacaaaacccagcaaggccttttgtcgtgagggcattagggagctggagggattttgagcagcagagggacataggttgtgttagtgtttgagcaccagccctctggtccctgtgtagatttagaggaccagactcagggatggggctgagggaggtagggaagggagggggcttggatcattgcaggagctatggggattccagaaatgttgaggggacggaggagtaggggataaacaaggattcctagcctggaaccagtgcccaagtcctgagtcttccaggagccacaggcagccttaagcctggtccccatacacaggctgaagtggcagttccagcggctgtccctgcggcagaggctgaggccgaggtgacgctgcgggagctccaggaagccctggaggaggaggtgctcacccggcagagcctgagccgggagatggaggccatccgcacggacaaccagaacttcgccaggtcgggatcggggccggggccggggccgggatgcgggccggtggcaacccttggcatcccctctcgtccggcccggacggactcaccgtccttacctccccacagtcaactacgcgaggcagaggctcggaaccgggacctagaggcacacgtccggcagttgcaggagcggatggagttgctgcaggcagagggagccacaggtgagtccctcatgtgtccccttccccggaggaccgggaggaggtgggccgtctgctccgcggggcgtgtatagacacctggaggagggaagggacccacgctggggcacgccgcgccaccgccctccttcgcccctccacgcgccctatgcctctttcttctccttccagctgtcacgggggtccccagtccccgggccacggatccaccttcccatgtaagacccctctctttcccctgcctcagacctgctgcccattctgcagatcccctccctggctcctggtctccccgtccagatatagggctcaccctacgtctttgcgactttagagggcagaagccctttattcagccccagatctccctccgttcaggcctcaccagattccctccgggatctccctagataacctccccaacctcgattcccctcgctgtctctcgccccaccgctgagggctgggctgggctccgatcgggtcacctgtcccttctctctccagctagatggccccccggccgtggctgtgggccagtgcccgctggtggggccaggccccatgcaccgccgccacctgctgctccctgccagggtacgtccggctgcccacgcccccctccgccgtcgcgccccgcgctccacccgccccttgccacccgcttagctgcgcatttgcggggctgggcccacggcaggagggcggatcttcgggcagccaatcaacacaggccgctaggaagcagccaatgacgagttcggacgggattcgaggcgtgcgagtggactaacaacagctgtaggctgttggggcgggggcggggcgcagggaagagtgcgggcccacctatgggcgtaggcggggcgagtcccaggagccaatcagaggcccatgccgggtgttgacctcgccctctccccgcaggtccctaggcctggcctatcggaggcgctttccctgctcctgttcgccgttgttctgtctcgtgccgccgccctgggctgcattgggttggtggcccacgccggccaactcaccgcagtctggcgccgcccaggagccgcccgcgctccctgaaccctagaactgtcttcgactccggggccccgttggaagactgagtgcccggggcacggcacagaagccgcgcccaccgcctgccagttcacaaccgctccgagcgtgggtctccgcccagctccagtcctgtgatccgggcccgccccctagcggccggggagggaggggccgggtccgcggccggcgaacggggctcgaagggtccttgtagccgggaatgctgctgctgctgctgctgctgctgctgctgctgctgctgctgctgctgctgctgctgctggggggatcacagaccatttctttctttcggccaggctgaggccctgacgtggatgggcaaactgcaggcctgggaaggcagcaagccgggccgtccgtgttccatcctccacgcacccccacctatcgttggttcgcaaagtgcaaagctttcttgtgcatgacgccctgctctggggagcgtctggcgcgatctctgcctgcttactcgggaaatttgcttttgccaaacccgctttttcggggatcccgcgcccccctcctcacttgcgctgctctcggagccccagccggctccgcccgcttcggcggtttggatatttattgacctcgtcctccgactcgctgacaggctacaggacccccaacaaccccaatccacgttttggatgcactgagaccccgacattcctcggtatttattgtctgtccccacctaggacccccacccccgaccctcgcgaataaaaggccctccatctgcccaaagctctggactccacagtgtccgcggtttgcgttgtgggccggaggctccgcagcgggccaatccggaggcgtgtggaggcggccgaaggtctgggaggagctagcgggatgcgaagcggccgaatcagggttgggggaggaaaagccacggggcggggctttggcgtccggccaataggagggcgagcgggccacccggaggcaccgcccccgcccagctgtggcccagctgtgccaccgagcgtcgagaagagggggctgggctggcagcgcgcgcggccatcctccttccactgcgcctgcgcacgccacgcgcatccgctcctgggacgcaagctcgagaaaagttgctgcaaactttctagcccgttccccgcccctcctcccggccagacccgccccccctgcggagccgggaattccgaggggcggagcgcaggccgagatggggaatgtgggggcctgcagaggaccctggagacggaggcgtgcagaagctcagtctcggggcggaggcttcgcgcccttagtcctcctggacggcccgttaccttctgcgttgtcccgatggggaaactgaggccctgagccagaagcacacgctggggggaggcagaaagcgcggccagaggcggagggaaaacaaagggagaatcacagacagacgggagggggacggacacacacaaggggacagagacccgagtggagagctggatctcgccttcccggcgtggggcgcagggtcggccagaaagaagatcgagaagagcggggagtgggggcgaaaaggggggacaggtgggggaggaggctggggaaagcccgagggaggaagagagggagggaggaacttcccaaagttgcaaaacatggctaccttgcctgcggagccgagcgcggggccggcggctgggggggaggcggtggcggcggcggcggcgaccgaagaggaggaggaggaagcgcgccagctcttgcagactttgcaggcggccgagggtgaggcggcggcggcggccggggccggggcgggcgcagcggctgcgggagctgagggcccgggatccccgggcgtccccgggtcgccccccgaggccgcttccgaaccgcccacgggcctccgcttctcgcccgagcaggtggcgtgcgtctgcgaggcgctgctccaggcgggccacgccggccgcttgagccgcttcctgggcgcactgcccccggccgagcgcctacgtggcagcgacccggtgttgcgcgcgcgggccctggtggccttccagcggggcgagtacgccgagctctaccggctactcgagagccgccccttccccgccgcccaccacgccttcctgcaggacctctacctgcgcgcgcgctaccatgaggccgagcgggcccgcggccgcgcgcttggcgcagtggacaagtatcgactgcgcaagaagttcccgctgcccaagaccatctgggacggcgaggagacagtctactgcttcaaggagcgctcccgcgcagcgctcaaggcctgctaccgcggcaaccgctaccccacgccggacgagaagcgccgcctggccacactcaccggcctgtcgctcacgcaggtcagcaactggttcaagaaccggcgacagcgcgaccggaccggggccggaggcggcgcgccctgcaagaggtgaggggcctcgggcggcgcaagtccagctctcccggggacatcccgtccaccagccctcttcccccgtgcccactgctggggccggcgcgccgaggtcctcggacatctcccgggaccagctcacaatctcaggcgcccgcggggcgcggggactaagtgtggacgggacaggcacccgcccgggccctctccccgcacgcgtctcctcttccagcggctccattccgagctccttcccaaatcccatcggtgttggggaatcacactgcggggggcactagagggactgaggaaaaaggacagggcctgtggccactccactccgcgtaggggctgcctcccagccccctttcttcactgaccgttactcttacccacccgcccccacactccctccgggcccggacggcgtggtccgtcttctgcctttgttgtgaaacgtgaacctttcccagctccggtttccctgtaacccaaacccttctcctcccaccctgagcgccggcctctcccttctctgacgccccgcggggagggcaccgggaactgggctggcggctgctgctccctctctccaggccactcgcccgctttccgcccaaccaaggaacttttagggcaacctgggagctcagcctctggggacccgaggccgaggtgggggagagcaagggcctcttccctccccagcgcttctctgcagtggtgtccacgcagggcttgcaaaaggccctggagtttggagtggtctcagagaggcgtcataacccctggaatgatccaccgaaacttgggccagggaaaggtgggggagcagctggctggctatgcgggaggccccacaggctaagggaccccagctgacagccatttctccggccagcgagtctgatgggaatcccacgactgaggacgagtccagccgaagtcctgaggacctggagagaggggcggccccagtgtccgccgaggccgctgcccagggctccatattcctggcagggaccggccctcccgcgccttgcccggcttcctcct

SEQ ID NO: 4 - DNA, 2933 bp, Homo sapiens
  source 1..2933: mol_type = genomic DNA
aggggggctggaccaaggggtggggagaaggggaggaggcctcggccggccgcagagagaagtggccagagaggcccaggggacagccagggacaggcagacatgcagccagggctccagggcctggacaggggctgccaggccctgtgacaggaggaccccgagcccccggcccggggaggggccatggtgctgcctgtccaacatgtcagccgaggtgcggctgaggcggctccagcagctggtgttggacccgggcttcctggggctggagcccctgctcgaccttctcctgggcgtccaccaggagctgggcgcctccgaactggcccaggacaagtacgtggccgacttcttgcagtgggccccaaatccagggttttccaaagtgtggttcaagaaccacctgcatctgaatctagagcggagcccatcgtggtgaggcttaaggaggtccgactgcagagggacgacttcgagattctgaaggtgatcggacgcggggcgttcagcgaggtagcggtagtgaagatgaagcagacgggccaggtgtatgccatgaagatcatgaacaagtgggacatgctgaagaggggcgaggtgtcgtgcttccgtgaggagagggacgtgttggtgaatggggaccggcggtggatcacgcagctgcacttcgccttccaggatgagaactacctgtacctggtcatggagtattacgtgggcggggacctgctgacactgctgagcaagtttggggagcggattccggccgagatggcgcgcttctacctggcggagattgtcatggccatagactcggtgcaccggcttggctacgtgcacagggacatcaaacccgacaacatcctgctggaccgctgtggccacatccgcctggccgacttcggctcttgcctcaagctgcgggcagatggaacggtgcggtcgctggtggctgtgggcaccccagactacctgtcccccgagatcctgcaggctgtgggcggtgggcctgggacaggcagctacgggcccgagtgtgactggtgggcgctgggtgtattcgcctatgaaatgttctatgggcagacgcccttctacgcggattccacggcggagacctatggcaagatcgtccactacaaggagcacctctctctgccgctggtggacgaaggggtccctgaggaggctcgagacttcattcagcggttgctgtgtcccccggagacacggctgggccggggtggagcaggcgacttccggacacatcccttcttctttggcctcgactgggatggtctccgggacagcgtgcccccctttacaccggatttcgaaggtgccaccgacacatgcaacttcgacttggtggaggacgggctcactgccatggtgagcgggggcggggagacactgtcggacattcgggaaggtgcgccgctaggggtccacctgccttttgtgggctactcctactcctgcatggccctcagggacagtgaggtcccaggccccacacccatggaactggaggccgagcagctgcttgagccacacgtgcaagcgcccagcctggagccctcggtgtccccacaggatgaaacagctgaagtggcagttccagcggctgtccctgcggcagaggctgaggccgaggtgacgctgcgggagctccaggaagccctggaggaggaggtgctcacccggcagagcctgagccgggagatggaggccatccgcacggacaaccagaacttcgccagtcaactacgcgaggcagaggctcggaaccgggacctagaggcacacgtccggcagttgcaggagcggatggagttgctgcaggcagagggagccacagctgtcacgggggtccccagtccccgggccacggatccaccttcccatctagatggccccccggccgtggctgtgggccagtgcccgctggtggggccaggccccatgcaccgccgccacctgctgctccctgccagggtccctaggcctggcctatcggaggcgctttccctgctcctgttcgccgttgttctgtctcgtgccgccgccctgggctgcattgggttggtggcccacgccggccaactcaccgcagtctggcgccgcccaggagccgcccgcgctccctgaaccctagaactgtcttcgactccggggccccgttggaagactgagtgcccggggcacggcacagaagccgcgcccaccgcctgccagttcacaaccgctccgagcgtgggtctccgcccagctccagtcctgtgatccgggcccgccccctagcggccggggagggaggggccgggtccgcggccggcgaacggggctcgaagggtccttgtagccgggaatgctgctgctgctgctgctgctgctgctgctgctgctgctgctgctgctgctgctgctgctggggggatcacagaccatttctttctttcggccaggctgaggccctgacgtggatgggcaaactgcaggcctgggaaggcagcaagccgggccgtccgtgttccatcctccacgcacccccacctatcgttggttcgcaaagtgcaaagctttcttgtgcatgacgccctgctctggggagcgtctggcgcgatctctgcctgcttactcgggaaatttgcttttgccaaacccgctttttcggggatcccgcgcccccctcctcacttgcgctgctctcggagccccagccggctccgcccgcttcggcggtttggatatttattgacctcgtcctccgactcgctgacaggctacaggacccccaacaaccccaatccacgttttggatgcactgagaccccgacattcctcggtatttattgtctgtccccacctaggacccccacccccgaccctcgcgaataaaaggccctccatctgcccaaagctctgga

SEQ ID NO: 5 - DNA, 2859 bp, Homo sapiens
  source 1..2859: mol_type = genomic DNA
aggggggctggaccaaggggtggggagaaggggaggaggcctcggccggccgcagagagaagtggccagagaggcccaggggacagccagggacaggcagacatgcagccagggctccagggcctggacaggggctgccaggccctgtgacaggaggaccccgagcccccggcccggggaggggccatggtgctgcctgtccaacatgtcagccgaggtgcggctgaggcggctccagcagctggtgttggacccgggcttcctggggctggagcccctgctcgaccttctcctgggcgtccaccaggagctgggcgcctccgaactggcccaggacaagtacgtggccgacttcttgcagtgggcggagcccatcgtggtgaggcttaaggaggtccgactgcagagggacgacttcgagattctgaaggtgatcggacgcggggcgttcagcgaggtagcggtagtgaagatgaagcagacgggccaggtgtatgccatgaagatcatgaacaagtgggacatgctgaagaggggcgaggtgtcgtgcttccgtgaggagagggacgtgttggtgaatggggaccggcggtggatcacgcagctgcacttcgccttccaggatgagaactacctgtacctggtcatggagtattacgtgggcggggacctgctgacactgctgagcaagtttggggagcggattccggccgagatggcgcgcttctacctggcggagattgtcatggccatagactcggtgcaccggcttggctacgtgcacagggacatcaaacccgacaacatcctgctggaccgctgtggccacatccgcctggccgacttcggctcttgcctcaagctgcgggcagatggaacggtgcggtcgctggtggctgtgggcaccccagactacctgtcccccgagatcctgcaggctgtgggcggtgggcctgggacaggcagctacgggcccgagtgtgactggtgggcgctgggtgtattcgcctatgaaatgttctatgggcagacgcccttctacgcggattccacggcggagacctatggcaagatcgtccactacaaggagcacctctctctgccgctggtggacgaaggggtccctgaggaggctcgagacttcattcagcggttgctgtgtcccccggagacacggctgggccggggtggagcaggcgacttccggacacatcccttcttctttggcctcgactgggatggtctccgggacagcgtgcccccctttacaccggatttcgaaggtgccaccgacacatgcaacttcgacttggtggaggacgggctcactgccatggagacactgtcggacattcgggaaggtgcgccgctaggggtccacctgccttttgtgggctactcctactcctgcatggccctcagggacagtgaggtcccaggccccacacccatggaactggaggccgagcagctgcttgagccacacgtgcaagcgcccagcctggagccctcggtgtccccacaggatgaaacagctgaagtggcagttccagcggctgtccctgcggcagaggctgaggccgaggtgacgctgcgggagctccaggaagccctggaggaggaggtgctcacccggcagagcctgagccgggagatggaggccatccgcacggacaaccagaacttcgccagtcaactacgcgaggcagaggctcggaaccgggacctagaggcacacgtccggcagttgcaggagcggatggagttgctgcaggcagagggagccacagctgtcacgggggtccccagtccccgggccacggatccaccttcccatctagatggccccccggccgtggctgtgggccagtgcccgctggtggggccaggccccatgcaccgccgccacctgctgctccctgccagggtccctaggcctggcctatcggaggcgctttccctgctcctgttcgccgttgttctgtctcgtgccgccgccctgggctgcattgggttggtggcccacgccggccaactcaccgcagtctggcgccgcccaggagccgcccgcgctccctgaaccctagaactgtcttcgactccggggccccgttggaagactgagtgcccggggcacggcacagaagccgcgcccaccgcctgccagttcacaaccgctccgagcgtgggtctccgcccagctccagtcctgtgatccgggcccgccccctagcggccggggagggaggggccgggtccgcggccggcgaacggggctcgaagggtccttgtagccgggaatgctgctgctgctgctgctgctgctgctgctgctgctgctgctgctgctgctgctgctgctggggggatcacagaccatttctttctttcggccaggctgaggccctgacgtggatgggcaaactgcaggcctgggaaggcagcaagccgggccgtccgtgttccatcctccacgcacccccacctatcgttggttcgcaaagtgcaaagctttcttgtgcatgacgccctgctctggggagcgtctggcgcgatctctgcctgcttactcgggaaatttgcttttgccaaacccgctttttcggggatcccgcgcccccctcctcacttgcgctgctctcggagccccagccggctccgcccgcttcggcggtttggatatttattgacctcgtcctccgactcgctgacaggctacaggacccccaacaaccccaatccacgttttggatgcactgagaccccgacattcctcggtatttattgtctgtccccacctaggacccccacccccgaccctcgcgaataaaaggccctccatctgcccaaagctctgga

SEQ ID NO: 6 - DNA, 17 bp, synthetic construct
  source 1..17: mol_type = other DNA
ctgagccgggagatgga

SEQ ID NO: 7 - DNA, 18 bp, synthetic construct
  source 1..18: mol_type = other DNA
ggacgtgtgcctctaggt

SEQ ID NO: 8 - DNA, 24 bp, synthetic construct
  source 1..24: mol_type = other DNA
tgactggcgaagttctggttgtcc

SEQ ID NO: 9 - DNA, 21 bp, synthetic construct
  source 1..21: mol_type = other DNA
tttacaccggatttcgaaggt

SEQ ID NO: 10 - DNA, 20 bp, synthetic construct
  source 1..20: mol_type = other DNA
cgaatgtccgacagtgtctc

SEQ ID NO: 11 - DNA, 24 bp, synthetic construct
  source 1..24: mol_type = other DNA
tcctccaccaagtcgaagttgcat

SEQ ID NO: 12 - DNA, 20 bp, synthetic construct
  source 1..20: mol_type = other DNA
ggcaaattcaacggcacagt

SEQ ID NO: 13 - DNA, 20 bp, synthetic construct
  source 1..20: mol_type = other DNA
gggtctcgctcctggaagat

SEQ ID NO: 14 - DNA, 27 bp, synthetic construct
  source 1..27: mol_type = other DNA
aaggccgagaatgggaagcttgtcatc

SEQ ID NO: 15 - DNA, 18 bp, synthetic construct
  source 1..18: mol_type = other DNA
agcctgagccgggagatg

SEQ ID NO: 16 - DNA, 21 bp, synthetic construct
  source 1..21: mol_type = other DNA
gcgtagttgactggcgaagtt

SEQ ID NO: 17 - DNA, 21 bp, synthetic construct
  source 1..21: mol_type = other DNA
aggccatccgcacggacaacc

SEQ ID NO: 18 - DNA, 20 bp, synthetic construct
  source 1..20: mol_type = other DNA
agacaataaataccgaggaa

SEQ ID NO: 19 - DNA, 20 bp, synthetic construct
  source 1..20: mol_type = other DNA
cttcccgaatgtccgacagt

SEQ ID NO: 20 - DNA, 20 bp, synthetic construct
  source 1..20: mol_type = other DNA
ccttcccgaatgtccgacag

SEQ ID NO: 21 - DNA, 20 bp, synthetic construct
  source 1..20: mol_type = other DNA
atgtgtaatgttgtccagta

SEQ ID NO: 22 - DNA, 20 bp, synthetic construct
  source 1..20: mol_type = other DNA
cagcttcaccctaggactgt

SEQ ID NO: 23 - DNA, 20 bp, synthetic construct
  source 1..20: mol_type = other DNA
aagtggcccctccagcattt

SEQ ID NO: 24 - DNA, 20 bp, synthetic construct
  source 1..20: mol_type = other DNA
acactctccataattctcta

SEQ ID NO: 25 - DNA, 20 bp, synthetic construct
  source 1..20: mol_type = other DNA
aaatcaggattcccacctgc

SEQ ID NO: 26 - DNA, 20 bp, synthetic construct
  source 1..20: mol_type = other DNA
cgaggtcaataaatatccaa

SEQ ID NO: 27 - DNA, 20 bp, synthetic construct
  source 1..20: mol_type = other DNA
cctaggctggaatctatcat

SEQ ID NO: 28 - DNA, 20 bp, synthetic construct
  source 1..20: mol_type = other DNA
cctaatgccctcacgacaaa

SEQ ID NO: 29 - DNA, 20 bp, synthetic construct
  source 1..20: mol_type = other DNA
tacctctagattcagatgca

SEQ ID NO: 30 - DNA, 20 bp, synthetic construct
  source 1..20: mol_type = other DNA
ttacttaatgccccactgta

SEQ ID NO: 31 - DNA, 20 bp, synthetic construct
  source 1..20: mol_type = other DNA
caggactctacgattccaaa

SEQ ID NO: 32 - DNA, 20 bp, synthetic construct
  source 1..20: mol_type = other DNA
tcagcaaaagggcacccaga

SEQ ID NO: 33 - DNA, 20 bp, synthetic construct
  source 1..20: mol_type = other DNA
cagtaaggttccaagactga

SEQ ID NO: 34 - DNA, 20 bp, synthetic construct
  source 1..20: mol_type = other DNA
acaagaaagctttgcacttt

SEQ ID NO: 35 - DNA, 20 bp, synthetic construct
  source 1..20: mol_type = other DNA
tgcttctgttcaggaagtcc

SEQ ID NO: 36 - DNA, 20 bp, synthetic construct
  source 1..20: mol_type = other DNA
acttgctcagcagtgtcagc

SEQ ID NO: 37 - DNA, 20 bp, synthetic construct
  source 1..20: mol_type = other DNA
ggcagattcactccccctga

SEQ ID NO: 38 - DNA, 20 bp, synthetic construct
  source 1..20: mol_type = other DNA
tggccttattgttatatggc

SEQ ID NO: 39 - DNA, 20 bp, synthetic construct
  source 1..20: mol_type = other DNA
tgtccttactccaactttat

SEQ ID NO: 40 - DNA, 20 bp, synthetic construct
  source 1..20: mol_type = other DNA
ccatctctcagtcctccagg

SEQ ID NO: 41 - DNA, 20 bp, synthetic construct
  source 1..20: mol_type = other DNA
gttctcatgtagaatgtcct

SEQ ID NO: 42 - DNA, 20 bp, synthetic construct
  source 1..20: mol_type = other DNA
cacttggcacctttccttcc

SEQ ID NO: 43 - DNA, 20 bp, synthetic construct
  source 1..20: mol_type = other DNA
cttccataatttaacactct

SEQ ID NO: 44 - DNA, 20 bp, synthetic construct
  source 1..20: mol_type = other DNA
cactaacacaacctatgtcc

SEQ ID NO: 45 - DNA, 20 bp, synthetic construct
  source 1..20: mol_type = other DNA
ggtaagagaccccccgcaac

SEQ ID NO: 46 - DNA, 20 bp, synthetic construct
  source 1..20: mol_type = other DNA
ctgtcccaggcccaccgccc

SEQ ID NO: 47 - DNA, 20 bp, synthetic construct
  source 1..20: mol_type = other DNA
caaaatccctccagctccct

SEQ ID NO: 48 - DNA, 20 bp, synthetic construct
  source 1..20: mol_type = other DNA
gccagggaccactgccatct

SEQ ID NO: 49 - DNA, 20 bp, synthetic construct
  source 1..20: mol_type = other DNA
tagtcctaccccttatttac

SEQ ID NO: 50 - DNA, 20 bp, synthetic construct
  source 1..20: mol_type = other DNA
aagtcaaggtcctatgacta

SEQ ID NO: 51 - DNA, 20 bp, synthetic construct
  source 1..20: mol_type = other DNA
cactaagatttccctggctt

SEQ ID NO: 52 - DNA, 20 bp, synthetic construct
  source 1..20: mol_type = other DNA
cctcccttgacatgtgaccg

SEQ ID NO: 53 - DNA, 20 bp, synthetic construct
  source 1..20: mol_type = other DNA
cgcccacagcctgcaggatc

SEQ ID NO: 54 - DNA, 20 bp, synthetic construct
  source 1..20: mol_type = other DNA
ccccggagtcgaagacagtt

SEQ ID NO: 55 - DNA, 20 bp, synthetic construct
  source 1..20: mol_type = other DNA
aatttaaggtcctccaactc

SEQ ID NO: 56 - DNA, 20 bp, synthetic construct
  source 1..20: mol_type = other DNA
gtccctctgctgctcaaaat

SEQ ID NO: 57 - DNA, 20 bp, synthetic construct
  source 1..20: mol_type = other DNA
atgagtgattcaggacccca

SEQ ID NO: 58 - DNA, 20 bp, synthetic construct
  source 1..20: mol_type = other DNA
taatttacttgtgataagca

SEQ ID NO: 59 - DNA, 20 bp, synthetic construct
  source 1..20: mol_type = other DNA
atgtggtcctaagactgggc

SEQ ID NO: 60 - DNA, 20 bp, synthetic construct
  source 1..20: mol_type = other DNA
aactgttctcttagacaaag

SEQ ID NO: 61 - DNA, 20 bp, synthetic construct
  source 1..20: mol_type = other DNA
ctttgcgaaccaacgatagg

SEQ ID NO: 62 - DNA, 20 bp, synthetic construct
  source 1..20: mol_type = other DNA
gttgcttcccttcagggcac

SEQ ID NO: 63 - DNA, 20 bp, synthetic construct
  source 1..20: mol_type = other DNA
ggacaggcagcaccatggcc

SEQ ID NO: 64 - DNA, 20 bp, synthetic construct
  source 1..20: mol_type = other DNA
gttttgtttcctgctggcct

SEQ ID NO: 65 - DNA, 20 bp, synthetic construct
  source 1..20: mol_type = other DNA
gtggcaccttcgaaatccgg

SEQ ID NO: 66 - DNA, 20 bp, synthetic construct
  source 1..20: mol_type = other DNA
acttcatattttccaagttc

SEQ ID NO: 67 - DNA, 20 bp, synthetic construct
  source 1..20: mol_type = other DNA
ctcagcctggccgaaagaaa

SEQ ID NO: 68 - DNA, 20 bp, synthetic construct
  source 1..20: mol_type = other DNA
cctgcctgtcggctgcgccc

SEQ ID NO: 69 - DNA, 20 bp, synthetic construct
  source 1..20: mol_type = other DNA
cgcggacccggcccctccct

SEQ ID NO: 70 - DNA, 20 bp, synthetic construct
  source 1..20: mol_type = other DNA
tgagcccttttaaggcagca

SEQ ID NO: 71 - DNA, 20 bp, synthetic construct
  source 1..20: mol_type = other DNA
cggtccccattcaccaacac

SEQ ID NO: 72 - DNA, 20 bp, synthetic construct
  source 1..20: mol_type = other DNA
cccgtcctccaccaagtcga

SEQ ID NO: 73 - DNA, 20 bp, synthetic construct
  source 1..20: mol_type = other DNA
cggcccggcttgctgccttc

SEQ ID NO: 74 - DNA, 20 bp, synthetic construct
  source 1..20: mol_type = other DNA
agtgcttacctgagggccat

SEQ ID NO: 75 - DNA, 20 bp, synthetic construct
  source 1..20: mol_type = other DNA
acccttcgagccccgttcgc

SEQ ID NO: 76 - DNA, 20 bp, synthetic construct
  source 1..20: mol_type = other DNA
tggccatgacaatctccgcc

SEQ ID NO: 77 - DNA, 20 bp, synthetic construct
  source 1..20: mol_type = other DNA
ccgagtaagcaggcagagat

SEQ ID NO: 78 - DNA, 20 bp, synthetic construct
  source 1..20: mol_type = other DNA
gctctgtgttcccccactgg

SEQ ID NO: 79 - DNA, 20 bp, synthetic construct
  source 1..20: mol_type = other DNA
gctgaccttactctgcccct

SEQ ID NO: 80 - DNA, 20 bp, synthetic construct
  source 1..20: mol_type = other DNA
gccggaatccgctccccaaa

SEQ ID NO: 81 - DNA, 20 bp, synthetic construct
  source 1..20: mol_type = other DNA
tctgtgccgtgccccgggca

SEQ ID NO: 82 - DNA, 20 bp, synthetic construct
  source 1..20: mol_type = other DNA
accccggcccagccgtgtct

SEQ ID NO: 83 - DNA, 20 bp, synthetic construct
  source 1..20: mol_type = other DNA
ccaaaccgccgaagcgggcg

SEQ ID NO: 84 - DNA, 20 bp, synthetic construct
  source 1..20: mol_type = other DNA
cccctcacctcgcccctctt

SEQ ID NO: 85 - DNA, 20 bp, synthetic construct
  source 1..20: mol_type = other DNA
cattcccggctacaaggacc

SEQ ID NO: 86 - DNA, 20 bp, synthetic construct
  source 1..20: mol_type = other DNA
tcccaggcctgcagtttgcc

SEQ ID NO: 87 - DNA, 20 bp, synthetic construct
  source 1..20: mol_type = other DNA
ctcggcctcagcctctgccg

SEQ ID NO: 88 - DNA, 20 bp, synthetic construct
  source 1..20: mol_type = other DNA
gggcggagacccacgctcgg

SEQ ID NO: 89 - DNA, 20 bp, synthetic construct
  source 1..20: mol_type = other DNA
tcagctcagatagctcccca

SEQ ID NO: 90 - DNA, 20 bp, synthetic construct
  source 1..20: mol_type = other DNA
cctccttaagcctcaccacg

SEQ ID NO: 91 - DNA, 20 bp, synthetic construct
  source 1..20: mol_type = other DNA
gcggcctgtgttgattggct

SEQ ID NO: 92 - DNA, 20 bp, synthetic construct
  source 1..20: mol_type = other DNA
tgtgcctctaggtcccggtt

SEQ ID NO: 93 - DNA, 20 bp, synthetic construct
  source 1..20: mol_type = other DNA
cctggcccgtctgcttcatc

SEQ ID NO: 94 - DNA, 20 bp, synthetic construct
  source 1..20: mol_type = other DNA
gctgacccacacggctcata

SEQ ID NO: 95 - DNA, 20 bp, synthetic construct
  source 1..20: mol_type = other DNA
gtttggcaaaagcaaatttc

SEQ ID NO: 96 - DNA, 20 bp, synthetic construct
  source 1..20: mol_type = other DNA
cagacaataaataccgagga

SEQ ID NO: 97 - DNA, 20 bp, synthetic construct
  source 1..20: mol_type = other DNA
accttcccgaatgtccgaca

SEQ ID NO: 98 - DNA, 20 bp, synthetic construct
  source 1..20: mol_type = other DNA
gggcagattcactccccctg

SEQ ID NO: 99 - DNA, 20 bp, synthetic construct
  source 1..20: mol_type = other DNA
acagatgtggtcctaagact

SEQ ID NO: 100 - DNA, 20 bp, synthetic construct
  source 1..20: mol_type = other DNA
ctgtccttactccaacttta

SEQ ID NO: 101 - DNA, 20 bp, synthetic construct
  source 1..20: mol_type = other DNA
tatgtccctctgctgctcaa

SEQ ID NO: 102 - DNA, 20 bp, synthetic construct
  source 1..20: mol_type = other DNA
tctaatttacttgtgataag

SEQ ID NO: 103 - DNA, 20 bp, synthetic construct
  source 1..20: mol_type = other DNA
tcaggactctacgattccaa

SEQ ID NO: 104 - DNA, 20 bp, synthetic construct
  source 1..20: mol_type = other DNA
tcagcttcaccctaggactg

SEQ ID NO: 105 - DNA, 20 bp, synthetic construct
  source 1..20: mol_type = other DNA
ctgcttctgttcaggaagtc

SEQ ID NO: 106 - DNA, 20 bp, synthetic construct
  source 1..20: mol_type = other DNA
gaagtcaaggtcctatgact

SEQ ID NO: 107 - DNA, 20 bp, synthetic construct
  source 1..20: mol_type = other DNA
cagtacctctagattcagat

SEQ ID NO: 108 - DNA, 20 bp, synthetic construct
  source 1..20: mol_type = other DNA
ctcctcccttgacatgtgac

SEQ ID NO: 109 - DNA, 20 bp, synthetic construct
  source 1..20: mol_type = other DNA
cttacttaatgccccactgt

SEQ ID NO: 110 - DNA, 20 bp, synthetic construct
  source 1..20: mol_type = other DNA
cctgtcccaggcccaccgcc

SEQ ID NO: 111 - DNA, 20 bp, synthetic construct
  source 1..20: mol_type = other DNA
aaatttaaggtcctccaact

SEQ ID NO: 112 - DNA, 20 bp, synthetic construct
  source 1..20: mol_type = other DNA
aaacttgctcagcagtgtca

SEQ ID NO: 113 - DNA, 20 bp, synthetic construct
  source 1..20: mol_type = other DNA
cccatctctcagtcctccag

SEQ ID NO: 114 - DNA, 20 bp, synthetic construct
  source 1..20: mol_type = other DNA
ggtggcaccttcgaaatccg

SEQ ID NO: 115 - DNA, 20 bp, synthetic construct
  source 1..20: mol_type = other DNA
gcttccataatttaacactc

SEQ ID NO: 116 - DNA, 20 bp, synthetic construct
  source 1..20: mol_type = other DNA
agtatgtgtaatgttgtcca

SEQ ID NO: 117 - DNA, 20 bp, synthetic construct
  source 1..20: mol_type = other DNA
aacagtaaggttccaagact

SEQ ID NO: 118 - DNA, 20 bp, synthetic construct
  source 1..20: mol_type = other DNA
cacactctccataattctct

SEQ ID NO: 119 - DNA, 20 bp, synthetic construct
  source 1..20: mol_type = other DNA
cgctcctgcaactgccggac

SEQ ID NO: 120 - DNA, 20 bp, synthetic construct
  source 1..20: mol_type = other DNA
atcctgttgcttcccttcag

SEQ ID NO: 121 - DNA, 20 bp, synthetic construct
  source 1..20: mol_type = other DNA
ccacttggcacctttccttc

SEQ ID NO: 122 - DNA, 20 bp, synthetic construct
  source 1..20: mol_type = other DNA
caactgttctcttagacaaa

SEQ ID NO: 123 - DNA, 20 bp, synthetic construct
  source 1..20: mol_type = other DNA
aatgagtgattcaggacccc

SEQ ID NO: 124 - DNA, 20 bp, synthetic construct
  source 1..20: mol_type = other DNA
caggtaagagaccccccgca

SEQ ID NO: 125 - DNA, 20 bp, synthetic construct
  source 1..20: mol_type = other DNA
tcaaaatccctccagctccc

SEQ ID NO: 126 - DNA, 20 bp, synthetic construct
  source 1..20: mol_type = other DNA
gttcagcaaaagggcaccca

SEQ ID NO: 127 - DNA, 20 bp, synthetic construct
  source 1..20: mol_type = other DNA
ccgcccacagcctgcaggat

SEQ ID NO: 128 - DNA, 20 bp, synthetic construct
  source 1..20: mol_type = other DNA
agccagggaccactgccatc

SEQ ID NO: 129 - DNA, 20 bp, synthetic construct
  source 1..20: mol_type = other DNA
cacaagaaagctttgcactt

SEQ ID NO: 130 - DNA, 20 bp, synthetic construct
  source 1..20: mol_type = other DNA
atggccttattgttatatgg

SEQ ID NO: 131 - DNA, 20 bp, synthetic construct
  source 1..20: mol_type = other DNA
gaatgttaaactgggcagcc

SEQ ID NO: 132 - DNA, 20 bp, synthetic construct
  source 1..20: mol_type = other DNA
gacactaagatttccctggc

SEQ ID NO: 133 - DNA, 20 bp, synthetic construct
  source 1..20: mol_type = other DNA
aacactaacacaacctatgt

SEQ ID NO: 134 - DNA, 20 bp, synthetic construct
  source 1..20: mol_type = other DNA
aaagtggcccctccagcatt

SEQ ID NO: 135 - DNA, 20 bp, synthetic construct
  source 1..20: mol_type = other DNA
ccctaatgccctcacgacaa

SEQ ID NO: 136 - DNA, 20 bp, synthetic construct
  source 1..20: mol_type = other DNA
acgaggtcaataaatatcca

SEQ ID NO: 137 - DNA, 20 bp, synthetic construct
  source 1..20: mol_type = other DNA
acaaatcaggattcccacct

SEQ ID NO: 138 - DNA, 20 bp, synthetic construct
  source 1..20: mol_type = other DNA
ggacccttcgagccccgttc

SEQ ID NO: 139 - DNA, 20 bp, synthetic construct
  source 1..20: mol_type = other DNA
acacctgcctgtcggctgcg

SEQ ID NO: 140 - DNA, 20 bp, synthetic construct
  source 1..20: mol_type = other DNA
cgttctcatgtagaatgtcc

SEQ ID NO: 141 - DNA, 20 bp, synthetic construct
  source 1..20: mol_type = other DNA
atttcccgagtaagcaggca

SEQ ID NO: 142 - DNA, 20 bp, synthetic construct
  source 1..20: mol_type = other DNA
gcactcagtcttccaacggg

SEQ ID NO: 143 - DNA, 20 bp, synthetic construct
  source 1..20: mol_type = other DNA
gcattcccggctacaaggac

SEQ ID NO: 144 - DNA, 20 bp, synthetic construct
  source 1..20: mol_type = other DNA
gcaatgcattatttgtgtaa

SEQ ID NO: 145 - DNA, 20 bp, synthetic construct
  source 1..20: mol_type = other DNA
tccaaaccgccgaagcgggc

SEQ ID NO: 146 - DNA, 20 bp, synthetic construct
  source 1..20: mol_type = other DNA
tggctgacccacacggctca

SEQ ID NO: 147 - DNA, 20 bp, synthetic construct
  source 1..20: mol_type = other DNA
ctgctctgtgttcccccact

SEQ ID NO: 148 - DNA, 20 bp, synthetic construct
  source 1..20: mol_type = other DNA
ggtttggcaaaagcaaattt

SEQ ID NO: 149 - DNA, 20 bp, synthetic construct
  source 1..20: mol_type = other DNA
gcccgtcctccaccaagtcg

SEQ ID NO: 150 - DNA, 20 bp, synthetic construct
  source 1..20: mol_type = other DNA
ggccggaatccgctccccaa

SEQ ID NO: 151 - DNA, 20 bp, synthetic construct
  source 1..20: mol_type = other DNA
gccggtccccattcaccaac

SEQ ID NO: 152 - DNA, 20 bp, synthetic construct
  source 1..20: mol_type = other DNA
tgggcggagacccacgctcg

SEQ ID NO: 153 - DNA, 20 bp, synthetic construct
  source 1..20: mol_type = other DNA
cagtgcttacctgagggcca

SEQ ID NO: 154 - DNA, 20 bp, synthetic construct
  source 1..20: mol_type = other DNA
atggccatgacaatctccgc

SEQ ID NO: 155 - DNA, 20 bp, synthetic construct
  source 1..20: mol_type = other DNA
gggttttgtttcctgctggc

SEQ ID NO: 156 - DNA, 20 bp, synthetic construct
  source 1..20: mol_type = other DNA
gcctcagcctggccgaaaga

SEQ ID NO: 157 - DNA, 20 bp, synthetic construct
  source 1..20: mol_type = other DNA
acggcccggcttgctgcctt

SEQ ID NO: 158 - DNA, 20 bp, synthetic construct
  source 1..20: mol_type = other DNA
tctcagctcagatagctccc

SEQ ID NO: 159 - DNA, 20 bp, synthetic construct
  source 1..20: mol_type = other DNA
ttagtcctaccccttattta

SEQ ID NO: 160 - DNA, 20 bp, synthetic construct
  source 1..20: mol_type = other DNA
gcattcttttacaactgatt

SEQ ID NO: 161 - DNA, 20 bp, synthetic construct
  source 1..20: mol_type = other DNA
tggacaggcagcaccatggc

SEQ ID NO: 162 - DNA, 20 bp, synthetic construct
  source 1..20: mol_type = other DNA
ccgcggacccggcccctccc

SEQ ID NO: 163 - DNA, 20 bp, synthetic construct
  source 1..20: mol_type = other DNA
ccttcccaggcctgcagttt

SEQ ID NO: 164 - DNA, 20 bp, synthetic construct
  source 1..20: mol_type = other DNA
acctccttaagcctcaccac

SEQ ID NO: 165 - DNA, 20 bp, synthetic construct
  source 1..20: mol_type = other DNA
cacctggcccgtctgcttca

SEQ ID NO: 166 - DNA, 20 bp, synthetic construct
  source 1..20: mol_type = other DNA
cgtcacctcggcctcagcct

SEQ ID NO: 167 - DNA, 20 bp, synthetic construct
  source 1..20: mol_type = other DNA
ttctgtgccgtgccccgggc

SEQ ID NO: 168 - DNA, 20 bp, synthetic construct
  source 1..20: mol_type = other DNA
gcccctcacctcgcccctct

SEQ ID NO: 169 - DNA, 20 bp, synthetic construct
  source 1..20: mol_type = other DNA
actttgcgaaccaacgatag

SEQ ID NO: 170 - DNA, 20 bp, synthetic construct
  source 1..20: mol_type = other DNA
ctccaccccggcccagccgt

SEQ ID NO: 171 - DNA, 20 bp, synthetic construct
  source 1..20: mol_type = other DNA
tgctgaccttactctgcccc

SEQ ID NO: 172 - DNA, 20 bp, synthetic construct
  source 1..20: mol_type = other DNA
attggctcctgggactcgcc

SEQ ID NO: 173 - DNA, 20 bp, synthetic construct
  source 1..20: mol_type = other DNA
acagacaataaataccgagg

SEQ ID NO: 174 - DNA, 20 bp, synthetic construct
  source 1..20: mol_type = other DNA
caccttcccgaatgtccgac

SEQ ID NO: 175 - DNA, 20 bp, synthetic construct
  source 1..20: mol_type = other DNA
ccaactgttctcttagacaa

SEQ ID NO: 176 - DNA, 20 bp, synthetic construct
  source 1..20: mol_type = other DNA
accacttggcacctttcctt

SEQ ID NO: 177 - DNA, 20 bp, synthetic construct
  source 1..20: mol_type = other DNA
gcctgtcccaggcccaccgc

SEQ ID NO: 178 - DNA, 20 bp, synthetic construct
  source 1..20: mol_type = other DNA
tccctaatgccctcacgaca

SEQ ID NO: 179 - DNA, 20 bp, synthetic construct
  source 1..20: mol_type = other DNA
ccacactctccataattctc

SEQ ID NO: 180 - DNA, 20 bp, synthetic construct
  source 1..20: mol_type = other DNA
gagccagggaccactgccat

SEQ ID NO: 181 - DNA, 20 bp, synthetic construct
  source 1..20: mol_type = other DNA
gccttcccaggcctgcagtt

SEQ ID NO: 182 - DNA, 20 bp, synthetic construct
  source 1..20: mol_type = other DNA
ggaatgagtgattcaggacc

SEQ ID NO: 183 - DNA, 20 bp, synthetic construct
  source 1..20: mol_type = other DNA
gcccatctctcagtcctcca

SEQ ID NO: 184 - DNA, 20 bp, synthetic construct
  source 1..20: mol_type = other DNA
ctatgtccctctgctgctca

SEQ ID NO: 185 - DNA, 20 bp, synthetic construct
  source 1..20: mol_type = other DNA
ctcaaaatccctccagctcc

SEQ ID NO: 186 - DNA, 20 bp, synthetic construct
  source 1..20: mol_type = other DNA
agacactaagatttccctgg

SEQ ID NO: 187 - DNA, 20 bp, synthetic construct
  source 1..20: mol_type = other DNA
actgtccttactccaacttt

SEQ ID NO: 188 - DNA, 20 bp, synthetic construct
  source 1..20: mol_type = other DNA
ccagtacctctagattcaga

SEQ ID NO: 189 - DNA, 20 bp, synthetic construct
  source 1..20: mol_type = other DNA
aaatggccttattgttatat

SEQ ID NO: 190 - DNA, 20 bp, synthetic construct
  source 1..20: mol_type = other DNA
caaacttgctcagcagtgtc

SEQ ID NO: 191 - DNA, 20 bp, synthetic construct
  source 1..20: mol_type = other DNA
ctcagcttcaccctaggact

SEQ ID NO: 192 - DNA, 20 bp, synthetic construct
  source 1..20: mol_type = other DNA
aaacagtaaggttccaagac

SEQ ID NO: 193 - DNA, 20 bp, synthetic construct
  source 1..20: mol_type = other DNA
tctgcttctgttcaggaagt

SEQ ID NO: 194 - DNA, 20 bp, synthetic construct
  source 1..20: mol_type = other DNA
gtattgttcagcaaaagggc

SEQ ID NO: 195 - DNA, 20 bp, synthetic construct
  source 1..20: mol_type = other DNA
ctcaggactctacgattcca

SEQ ID NO: 196 - DNA, 20 bp, synthetic construct
  source 1..20: mol_type = other DNA
cggtggcaccttcgaaatcc

SEQ ID NO: 197 - DNA, 20 bp, synthetic construct
  source 1..20: mol_type = other DNA
acctccacagatgtggtcct

SEQ ID NO: 198 - DNA, 20 bp, synthetic construct
  source 1..20: mol_type = other DNA
ccgctcctgcaactgccgga

SEQ ID NO: 199 - DNA, 20 bp, synthetic construct
  source 1..20: mol_type = other DNA
atagtatgtgtaatgttgtc

SEQ ID NO: 200 - DNA, 20 bp, synthetic construct
  source 1..20: mol_type = other DNA
accgcccacagcctgcagga

SEQ ID NO: 201 - DNA, 20 bp, synthetic construct
  source 1..20: mol_type = other DNA
ccttacttaatgccccactg

SEQ ID NO: 202 - DNA, 20 bp, synthetic construct
  source 1..20: mol_type = other DNA
ggcttccataatttaacact

SEQ ID NO: 203 - DNA, 20 bp, synthetic construct
  source 1..20: mol_type = other DNA
taaagtggcccctccagcat

SEQ ID NO: 204 - DNA, 20 bp, synthetic construct
  source 1..20: mol_type = other DNA
agaagtcaaggtcctatgac

SEQ ID NO: 205 - DNA, 20 bp, synthetic construct
  source 1..20: mol_type = other DNA
tatcctgttgcttcccttca

SEQ ID NO: 206 - DNA, 20 bp, synthetic construct
  source 1..20: mol_type = other DNA
ttctaatttacttgtgataa

SEQ ID NO: 207 - DNA, 20 bp, synthetic construct
  source 1..20: mol_type = other DNA
tgggcagattcactccccct

SEQ ID NO: 208 - DNA, 20 bp, synthetic construct
  source 1..20: mol_type = other DNA
tttagtcctaccccttattt

SEQ ID NO: 209 - DNA, 20 bp, synthetic construct
  source 1..20: mol_type = other DNA
gaaaatttaaggtcctccaa

SEQ ID NO: 210 - DNA, 20 bp, synthetic construct
  source 1..20: mol_type = other DNA
aacaaatcaggattcccacc

SEQ ID NO: 211 - DNA, 20 bp, synthetic construct
  source 1..20: mol_type = other DNA
ccaggtaagagaccccccgc

SEQ ID NO: 212 - DNA, 20 bp, synthetic construct
  source 1..20: mol_type = other DNA
ggaatgttaaactgggcagc

SEQ ID NO: 213 - DNA, 20 bp, synthetic construct
  source 1..20: mol_type = other DNA
cactttgcgaaccaacgata

SEQ ID NO: 214 - DNA, 20 bp, synthetic construct
  source 1..20: mol_type = other DNA
atgttggacaggcagcacca

SEQ ID NO: 215 - DNA, 20 bp, synthetic construct
  source 1..20: mol_type = other DNA
ctgggttttgtttcctgctg

SEQ ID NO: 216 - DNA, 20 bp, synthetic construct
  source 1..20: mol_type = other DNA
aacacctgcctgtcggctgc

SEQ ID NO: 217 - DNA, 20 bp, synthetic construct
  source 1..20: mol_type = other DNA
agcccgtcctccaccaagtc

SEQ ID NO: 218 - DNA, 20 bp, synthetic construct
  source 1..20: mol_type = other DNA
caaatttcccgagtaagcag

SEQ ID NO: 219 - DNA, 20 bp, synthetic construct
  source 1..20: mol_type = other DNA
cctccgataggccaggccta

SEQ ID NO: 220 - DNA, 20 bp, synthetic construct
  source 1..20: mol_type = other DNA
agcattcccggctacaagga

SEQ ID NO: 221 - DNA, 20 bp, synthetic construct
  source 1..20: mol_type = other DNA
agcccctcacctcgcccctc

SEQ ID NO: 222 - DNA, 20 bp, synthetic construct
  source 1..20: mol_type = other DNA
tgccacttcagcctgtgtat

SEQ ID NO: 223 - DNA, 20 bp, synthetic construct
  source 1..20: mol_type = other DNA
ctgggcggagacccacgctc

SEQ ID NO: 224 - DNA, 20 bp, synthetic construct
  source 1..20: mol_type = other DNA
cctcctctgcttaggaaaag

SEQ ID NO: 225 - DNA, 20 bp, synthetic construct
  source 1..20: mol_type = other DNA
ctatggccatgacaatctcc

SEQ ID NO: 226 - DNA, 20 bp, synthetic construct
  source 1..20: mol_type = other DNA
gggcctcagcctggccgaaa

SEQ ID NO: 227 - DNA, 20 bp, synthetic construct
  source 1..20: mol_type = other DNA
gcacaagaaagctttgcact

SEQ ID NO: 228 - DNA, 20 bp, synthetic construct
  source 1..20: mol_type = other DNA
tacacctggcccgtctgctt

SEQ ID NO: 229 - DNA, 20 bp, synthetic construct
  source 1..20: mol_type = other DNA
tgctccaccccggcccagcc

SEQ ID NO: 230 - DNA, 20 bp, synthetic construct
  source 1..20: mol_type = other DNA
aagacccagttcttccacct

SEQ ID NO: 231 - DNA, 20 bp, synthetic construct
  source 1..20: mol_type = other DNA
gacgaggtcaataaatatcc

SEQ ID NO: 232 - DNA, 20 bp, synthetic construct
  source 1..20: mol_type = other DNA
agcgcgccatctcggccgga

SEQ ID NO: 233 - DNA, 20 bp, synthetic construct
  source 1..20: mol_type = other DNA
agcaatgcattatttgtgta

SEQ ID NO: 234 - DNA, 20 bp, synthetic construct
  source 1..20: mol_type = other DNA
gcggcttctgtgccgtgccc

SEQ ID NO: 235 - DNA, 20 bp, synthetic construct
  source 1..20: mol_type = other DNA
gtgagcacctcctcctccag

SEQ ID NO: 236 - DNA, 20 bp, synthetic construct
  source 1..20: mol_type = other DNA
actgctctgtgttcccccac

SEQ ID NO: 237 - DNA, 20 bp, synthetic construct
  source 1..20: mol_type = other DNA
caggagaactaaaggacgca

SEQ ID NO: 238 - DNA, 20 bp, synthetic construct
  source 1..20: mol_type = other DNA
gcagtgcttacctgagggcc

SEQ ID NO: 239 - DNA, 20 bp, synthetic construct
  source 1..20: mol_type = other DNA
gctggccctcctggcttgcc

SEQ ID NO: 240 - DNA, 20 bp, synthetic construct
  source 1..20: mol_type = other DNA
gacctccttaagcctcacca

SEQ ID NO: 241 - DNA, 20 bp, synthetic construct
  source 1..20: mol_type = other DNA
tcatccctccaagtctcagc

SEQ ID NO: 242 - DNA, 20 bp, synthetic construct
  source 1..20: mol_type = other DNA
gacggcccggcttgctgcct

SEQ ID NO: 243 - DNA, 20 bp, synthetic construct
  source 1..20: mol_type = other DNA
aggacccttcgagccccgtt

SEQ ID NO: 244 - DNA, 20 bp, synthetic construct
  source 1..20: mol_type = other DNA
gccgcggacccggcccctcc

SEQ ID NO: 245 - DNA, 20 bp, synthetic construct
  source 1..20: mol_type = other DNA
tatccaaaccgccgaagcgg

SEQ ID NO: 246 - DNA, 20 bp, synthetic construct
  source 1..20: mol_type = other DNA
gggtttggcaaaagcaaatt

SEQ ID NO: 247 - DNA, 20 bp, synthetic construct
  source 1..20: mol_type = other DNA
caccaggtagttctcatcct

SEQ ID NO: 248 - DNA, 20 bp, synthetic construct
  source 1..20: mol_type = other DNA
gggcactcagtcttccaacg

SEQ ID NO: 249 - DNA, 20 bp, synthetic construct
  source 1..20: mol_type = other DNA
ttgcattcttttacaactga

SEQ ID NO: 250 - DNA, 20 bp, synthetic construct
  source 1..20: mol_type = other DNA
gacagacaataaataccgag

SEQ ID NO: 251 - DNA, 20 bp, synthetic construct
  source 1..20: mol_type = other DNA
tgagcccgtcctccaccaag

SEQ ID NO: 252 - DNA, 20 bp, synthetic construct
  source 1..20: mol_type = other DNA
ggacgaggtcaataaatatc

SEQ ID NO: 253 - DNA, 20 bp, synthetic construct
  source 1..20: mol_type = other DNA
tccaggtaagagaccccccg

SEQ ID NO: 254 - DNA, 20 bp, synthetic construct
  source 1..20: mol_type = other DNA
acaagattctgggaagccca

SEQ ID NO: 255 - DNA, 20 bp, synthetic construct
  source 1..20: mol_type = other DNA
tgagccagggaccactgcca

SEQ ID NO: 256 - DNA, 20 bp, synthetic construct
  source 1..20: mol_type = other DNA
gagacactaagatttccctg

SEQ ID NO: 257 - DNA, 20 bp, synthetic construct
  source 1..20: mol_type = other DNA
gcaccttcccgaatgtccga

SEQ ID NO: 258 - DNA, 20 bp, synthetic construct
  source 1..20: mol_type = other DNA
ccagtattgttcagcaaaag

SEQ ID NO: 259 - DNA, 20 bp, synthetic construct
  source 1..20: mol_type = other DNA
cctcagtagtagatgggcac

SEQ ID NO: 260 - DNA, 20 bp, synthetic construct
  source 1..20: mol_type = other DNA
tctcagaagtcaaggtccta

SEQ ID NO: 261 - DNA, 20 bp, synthetic construct
  source 1..20: mol_type = other DNA
agcccatctctcagtcctcc

SEQ ID NO: 262 - DNA, 20 bp, synthetic construct
  source 1..20: mol_type = other DNA
agctgcctgtcccaggccca

SEQ ID NO: 263 - DNA, 20 bp, synthetic construct
  source 1..20: mol_type = other DNA
gccacactctccataattct

SEQ ID NO: 264 - DNA, 20 bp, synthetic construct
  source 1..20: mol_type = other DNA
ctgggcagattcactccccc

SEQ ID NO: 265 - DNA, 20 bp, synthetic construct
  source 1..20: mol_type = other DNA
cccaaaacagtaaggttcca

SEQ ID NO: 266 - DNA, 20 bp, synthetic construct
  source 1..20: mol_type = other DNA
gaccacttggcacctttcct

SEQ ID NO: 267 - DNA, 20 bp, synthetic construct
  source 1..20: mol_type = other DNA
tttctaatttacttgtgata

SEQ ID NO: 268 - DNA, 20 bp, synthetic construct
  source 1..20: mol_type = other DNA
tctcagcttcaccctaggac

SEQ ID NO: 269 - DNA, 20 bp, synthetic construct
  source 1..20: mol_type = other DNA
accaactgttctcttagaca

SEQ ID NO: 270 - DNA, 20 bp, synthetic construct
  source 1..20: mol_type = other DNA
ccaaacttgctcagcagtgt

SEQ ID NO: 271 - DNA, 20 bp, synthetic construct
  source 1..20: mol_type = other DNA
ggtttgatgtccctgtgcac

SEQ ID NO: 272 - DNA, 20 bp, synthetic construct
  source 1..20: mol_type = other DNA
tgtctgcttctgttcaggaa

SEQ ID NO: 273 - DNA, 20 bp, synthetic construct
  source 1..20: mol_type = other DNA
taggaatgttaaactgggca

SEQ ID NO: 274 - DNA, 20 bp, synthetic construct
  source 1..20: mol_type = other DNA
gtatcctgttgcttcccttc

SEQ ID NO: 275 - DNA, 20 bp, synthetic construct
  source 1..20: mol_type = other DNA
tccagtacctctagattcag

SEQ ID NO: 276 - DNA, 20 bp, synthetic construct
  source 1..20: mol_type = other DNA
cactgtccttactccaactt

SEQ ID NO: 277 - DNA, 20 bp, synthetic construct
  source 1..20: mol_type = other DNA
ctaaagtggcccctccagca

SEQ ID NO: 278 - DNA, 20 bp, synthetic construct
  source 1..20: mol_type = other DNA
gcactttgcgaaccaacgat

SEQ ID NO: 279 - DNA, 20 bp, synthetic construct
  source 1..20: mol_type = other DNA
caccgcccacagcctgcagg

SEQ ID NO: 280 - DNA, 20 bp, synthetic construct
  source 1..20: mol_type = other DNA
gctcaaaatccctccagctc

SEQ ID NO: 281 - DNA, 20 bp, synthetic construct
  source 1..20: mol_type = other DNA
cacctccacagatgtggtcc

SEQ ID NO: 282 - DNA, 20 bp, synthetic construct
  source 1..20: mol_type = other DNA
tccgctcctgcaactgccgg

SEQ ID NO: 283 - DNA, 20 bp, synthetic construct
  source 1..20: mol_type = other DNA
ctccctaatgccctcacgac

SEQ ID NO: 284 - DNA, 20 bp, synthetic construct
  source 1..20: mol_type = other DNA
tcggtggcaccttcgaaatc

SEQ ID NO: 285 - DNA, 20 bp, synthetic construct
  source 1..20: mol_type = other DNA
tgcacaagaaagctttgcac

SEQ ID NO: 286 - DNA, 20 bp, synthetic construct
  source 1..20: mol_type = other DNA
cccttacttaatgccccact

SEQ ID NO: 287 - DNA, 20 bp, synthetic construct
  source 1..20: mol_type = other DNA
gactcaggactctacgattc

SEQ ID NO: 288 - DNA, 20 bp, synthetic construct
  source 1..20: mol_type = other DNA
ggaacaaatcaggattccca

SEQ ID NO: 289 - DNA, 20 bp, synthetic construct
  source 1..20: mol_type = other DNA
cctatgtccctctgctgctc

SEQ ID NO: 290 - DNA, 20 bp, synthetic construct
  source 1..20: mol_type = other DNA
ccgacaagctccagaactgg

SEQ ID NO: 291 - DNA, 20 bp, synthetic construct
  source 1..20: mol_type = other DNA
aagcaatgcattatttgtgt

SEQ ID NO: 292 - DNA, 20 bp, synthetic construct
  source 1..20: mol_type = other DNA
gataaggtatagtatgtgta

SEQ ID NO: 293 - DNA, 20 bp, synthetic construct
  source 1..20: mol_type = other DNA
ctttagtcctaccccttatt

SEQ ID NO: 294 - DNA, 20 bp, synthetic construct
  source 1..20: mol_type = other DNA
ggaggagtcctctcctgctt

SEQ ID NO: 295 - DNA, 20 bp, synthetic construct
  source 1..20: mol_type = other DNA
gcacgattttttcaattttt

SEQ ID NO: 296 - DNA, 20 bp, synthetic construct
  source 1..20: mol_type = other DNA
agggcctcagcctggccgaa

SEQ ID NO: 297 - DNA, 20 bp, synthetic construct
  source 1..20: mol_type = other DNA
aaggacccttcgagccccgt

SEQ ID NO: 298 - DNA, 20 bp, synthetic construct
  source 1..20: mol_type = other DNA
aataagacccagttcttcca

SEQ ID NO: 299 - DNA, 20 bp, synthetic construct
  source 1..20: mol_type = other DNA
tgccttcccaggcctgcagt

SEQ ID NO: 300 - DNA, 20 bp, synthetic construct
  source 1..20: mol_type = other DNA
cgggtttggcaaaagcaaat

SEQ ID NO: 301 - DNA, 20 bp, synthetic construct
  source 1..20: mol_type = other DNA
ctgccccatgctggccctcc

SEQ ID NO: 302 - DNA, 20 bp, synthetic construct
  source 1..20: mol_type = other DNA
gctgacatgttggacaggca

SEQ ID NO: 303 - DNA, 20 bp, synthetic construct
  source 1..20: mol_type = other DNA
agcagcattcccggctacaa

SEQ ID NO: 304 - DNA, 20 bp, synthetic construct
  source 1..20: mol_type = other DNA
cgcggcttctgtgccgtgcc

SEQ ID NO: 305 - DNA, 20 bp, synthetic construct
  source 1..20: mol_type = other DNA
ggtgagcacctcctcctcca

SEQ ID NO: 306 - DNA, 20 bp, synthetic construct
  source 1..20: mol_type = other DNA
cgggcactcagtcttccaac

SEQ ID NO: 307 - DNA, 20 bp, synthetic construct
  source 1..20: mol_type = other DNA
gcaactccattggctgccaa

SEQ ID NO: 308 - DNA, 20 bp, synthetic construct
  source 1..20: mol_type = other DNA
ggacctccttaagcctcacc

SEQ ID NO: 309 - DNA, 20 bp, synthetic construct
  source 1..20: mol_type = other DNA
ccaggagaactaaaggacgc

SEQ ID NO: 310 - DNA, 20 bp, synthetic construct
  source 1..20: mol_type = other DNA
aaagaagaagggatgtgtcc

SEQ ID NO: 311 - DNA, 20 bp, synthetic construct
  source 1..20: mol_type = other DNA
ctgccacttcagcctgtgta

SEQ ID NO: 312 - DNA, 20 bp, synthetic construct
  source 1..20: mol_type = other DNA
cgcctccgataggccaggcc

SEQ ID NO: 313 - DNA, 20 bp, synthetic construct
  source 1..20: mol_type = other DNA
tttgcattcttttacaactg

SEQ ID NO: 314 - DNA, 20 bp, synthetic construct
  source 1..20: mol_type = other DNA
gctgcttccaagacctcctg

SEQ ID NO: 315 - DNA, 20 bp, synthetic construct
  source 1..20: mol_type = other DNA
gctgggcggagacccacgct

SEQ ID NO: 316 - DNA, 20 bp, synthetic construct
  source 1..20: mol_type = other DNA
aagcgcgccatctcggccgg

SEQ ID NO: 317 - DNA, 20 bp, synthetic construct
  source 1..20: mol_type = other DNA
gcaaatttcccgagtaagca

SEQ ID NO: 318 - DNA, 20 bp, synthetic construct
  source 1..20: mol_type = other DNA
ggccgcggacccggcccctc

SEQ ID NO: 319 - DNA, 20 bp, synthetic construct
  source 1..20: mol_type = other DNA
tcaccaggtagttctcatcc

SEQ ID NO: 320 - DNA, 20 bp, synthetic construct
  source 1..20: mol_type = other DNA
gctgggttttgtttcctgct

SEQ ID NO: 321 - DNA, 20 bp, synthetic construct
  source 1..20: mol_type = other DNA
gactgctctgtgttccccca

SEQ ID NO: 322 - DNA, 20 bp, synthetic construct
  source 1..20: mol_type = other DNA
aatatccaaaccgccgaagc

SEQ ID NO: 323 - DNA, 20 bp, synthetic construct
  source 1..20: mol_type = other DNA
cagcccctcacctcgcccct

SEQ ID NO: 324 - DNA, 20 bp, synthetic construct
  source 1..20: mol_type = other DNA
ctcttcagcatgtcccactt

SEQ ID NO: 325 - DNA, 20 bp, synthetic construct
  source 1..20: mol_type = other DNA
gaacacctgcctgtcggctg

SEQ ID NO: 326 - DNA, 20 bp, synthetic construct
  source 1..20: mol_type = other DNA
ggacggcccggcttgctgcc

SEQ ID NO: 327 - DNA, 20 bp, synthetic construct
  source 1..20: mol_type = other DNA
tgagacactaagatttccct

SEQ ID NO: 328 - DNA, 20 bp, synthetic construct
  source 1..20: mol_type = other DNA
ataagcaatgcattatttgt

SEQ ID NO: 329 - DNA, 20 bp, synthetic construct
  source 1..20: mol_type = other DNA
gcccaaaacagtaaggttcc

SEQ ID NO: 330 - DNA, 20 bp, synthetic construct
  source 1..20: mol_type = other DNA
gctccctaatgccctcacga

SEQ ID NO: 331 - DNA, 20 bp, synthetic construct
  source 1..20: mol_type = other DNA
gtgagcccgtcctccaccaa

SEQ ID NO: 332 - DNA, 20 bp, synthetic construct
  source 1..20: mol_type = other DNA
acccttacttaatgccccac

SEQ ID NO: 333 - DNA, 20 bp, synthetic construct
  source 1..20: mol_type = other DNA
tcccgacaagctccagaact

SEQ ID NO: 334 - DNA, 20 bp, synthetic construct
  source 1..20: mol_type = other DNA
gggtttgatgtccctgtgca

SEQ ID NO: 335 - DNA, 20 bp, synthetic construct
  source 1..20: mol_type = other DNA
attaatgataaggtatagta

SEQ ID NO: 336 - DNA, 20 bp, synthetic construct
  source 1..20: mol_type = other DNA
tcctcagtagtagatgggca

SEQ ID NO: 337 - DNA, 20 bp, synthetic construct
  source 1..20: mol_type = other DNA
tgtatcctgttgcttccctt

SEQ ID NO: 338 - DNA, 20 bp, synthetic construct
  source 1..20: mol_type = other DNA
gtcggtggcaccttcgaaat

SEQ ID NO: 339 - DNA, 20 bp, synthetic construct
  source 1..20: mol_type = other DNA
tgaccacttggcacctttcc

SEQ ID NO: 340 - DNA, 20 bp, synthetic construct
  source 1..20: mol_type = other DNA
aaccaactgttctcttagac

SEQ ID NO: 341 - DNA, 20 bp, synthetic construct
  source 1..20: mol_type = other DNA
tctaaagtggcccctccagc

SEQ ID NO: 342 - DNA, 20 bp, synthetic construct
  source 1..20: mol_type = other DNA
ccccaaacttgctcagcagt

SEQ ID NO: 343 - DNA, 20 bp, synthetic construct
  source 1..20: mol_type = other DNA
tagctgcctgtcccaggccc

SEQ ID NO: 344 - DNA, 20 bp, synthetic construct
  source 1..20: mol_type = other DNA
ttccaggtaagagacccccc

SEQ ID NO: 345 - DNA, 20 bp, synthetic construct
  source 1..20: mol_type = other DNA
gcactgtccttactccaact

SEQ ID NO: 346 - DNA, 20 bp, synthetic construct
  source 1..20: mol_type = other DNA
tcacaggactggagctgggc

SEQ ID NO: 347 - DNA, 20 bp, synthetic construct
  source 1..20: mol_type = other DNA
gtgagccagggaccactgcc

SEQ ID NO: 348 - DNA, 20 bp, synthetic construct
  source 1..20: mol_type = other DNA
tgccacactctccataattc

SEQ ID NO: 349 - DNA, 20 bp, synthetic construct
  source 1..20: mol_type = other DNA
cccaccgcccacagcctgca

SEQ ID NO: 350 - DNA, 20 bp, synthetic construct
  source 1..20: mol_type = other DNA
tgctcaaaatccctccagct

SEQ ID NO: 351 - DNA, 20 bp, synthetic construct
  source 1..20: mol_type = other DNA
acctatgtccctctgctgct

SEQ ID NO: 352 - DNA, 20 bp, synthetic construct
  source 1..20: mol_type = other DNA
aggacgaggtcaataaatat

SEQ ID NO: 353 - DNA, 20 bp, synthetic construct
  source 1..20: mol_type = other DNA
taggactgtctgcttcccag

SEQ ID NO: 354 - DNA, 20 bp, synthetic construct
  source 1..20: mol_type = other DNA
tgcactttgcgaaccaacga

SEQ ID NO: 355 - DNA, 20 bp, synthetic construct
  source 1..20: mol_type = other DNA
ttacaagattctgggaagcc

SEQ ID NO: 356 - DNA, 20 bp, synthetic construct
  source 1..20: mol_type = other DNA
cccagtattgttcagcaaaa

SEQ ID NO: 357 - DNA, 20 bp, synthetic construct
  source 1..20: mol_type = other DNA
cccccaaattttgtgcaggt

SEQ ID NO: 358 - DNA, 20 bp, synthetic construct
  source 1..20: mol_type = other DNA
cgcaccttcccgaatgtccg

SEQ ID NO: 359 - DNA, 20 bp, synthetic construct
  source 1..20: mol_type = other DNA
cactgggcagattcactccc

SEQ ID NO: 360 - DNA, 20 bp, synthetic construct
  source 1..20: mol_type = other DNA
gaatgattcagccaaactac

SEQ ID NO: 361 - DNA, 20 bp, synthetic construct
  source 1..20: mol_type = other DNA
cagcccatctctcagtcctc

SEQ ID NO: 362 - DNA, 20 bp, synthetic construct
  source 1..20: mol_type = other DNA
agatatcaacttccttttcc

SEQ ID NO: 363 - DNA, 20 bp, synthetic construct
  source 1..20: mol_type = other DNA
ctgtctgcttctgttcagga

SEQ ID NO: 364 - DNA, 20 bp, synthetic construct
  source 1..20: mol_type = other DNA
ctctcagaagtcaaggtcct

SEQ ID NO: 365 - DNA, 20 bp, synthetic construct
  source 1..20: mol_type = other DNA
atccgctcctgcaactgccg

SEQ ID NO: 366 - DNA, 20 bp, synthetic construct
  source 1..20: mol_type = other DNA
ggacagacaataaataccga

SEQ ID NO: 367 - DNA, 20 bp, synthetic construct
  source 1..20: mol_type = other DNA
atccagtacctctagattca

SEQ ID NO: 368 - DNA, 20 bp, synthetic construct
  source 1..20: mol_type = other DNA
ctaggaatgttaaactgggc

SEQ ID NO: 369 - DNA, 20 bp, synthetic construct
  source 1..20: mol_type = other DNA
ctgccttcccaggcctgcag

SEQ ID NO: 370 - DNA, 20 bp, synthetic construct
  source 1..20: mol_type = other DNA
gccacctccacagatgtggt

SEQ ID NO: 371 - DNA, 20 bp, synthetic construct
  source 1..20: mol_type = other DNA
ggctgattcaaagaatttgc

SEQ ID NO: 372 - DNA, 20 bp, synthetic construct
  source 1..20: mol_type = other DNA
actgccacttcagcctgtgt

SEQ ID NO: 373 - DNA, 20 bp, synthetic construct
  source 1..20: mol_type = other DNA
ccgggcactcagtcttccaa

SEQ ID NO: 374 - DNA, 20 bp, synthetic construct
  source 1..20: mol_type = other DNA
gctcaccaggtagttctcat

SEQ ID NO: 375 - DNA, 20 bp, synthetic construct
  source 1..20: mol_type = other DNA
cagcagcattcccggctaca

SEQ ID NO: 376 - DNA, 20 bp, synthetic construct
  source 1..20: mol_type = other DNA
ccaggtagaagcgcgccatc

SEQ ID NO: 377 - DNA, 20 bp, synthetic construct
  source 1..20: mol_type = other DNA
tcaagcagctgctcggcctc

SEQ ID NO: 378 - DNA, 20 bp, synthetic construct
  source 1..20: mol_type = other DNA
tcggctgacatgttggacag

SEQ ID NO: 379 - DNA, 20 bp, synthetic construct
  source 1..20: mol_type = other DNA
gcgcggcttctgtgccgtgc

SEQ ID NO: 380 - DNA, 20 bp, synthetic construct
  source 1..20: mol_type = other DNA
tcaccacgatgggctccgct

SEQ ID NO: 381 - DNA, 20 bp, synthetic construct
  source 1..20: mol_type = other DNA
gcgggtttggcaaaagcaaa

SEQ ID NO: 382 - DNA, 20 bp, synthetic construct
  source 1..20: mol_type = other DNA
cggccgcggacccggcccct

SEQ ID NO: 383 - DNA, 20 bp, synthetic construct
  source 1..20: mol_type = other DNA
atgcacaagaaagctttgca

SEQ ID NO: 384 - DNA, 20 bp, synthetic construct
  source 1..20: mol_type = other DNA
gaggccaaagaagaagggat

SEQ ID NO: 385 - DNA, 20 bp, synthetic construct
  source 1..20: mol_type = other DNA
tggcacgattttttcaattt

SEQ ID NO: 386 - DNA, 20 bp, synthetic construct
  source 1..20: mol_type = other DNA
ggccaggagaactaaaggac

SEQ ID NO: 387 - DNA, 20 bp, synthetic construct
  source 1..20: mol_type = other DNA
cctcttcagcatgtcccact

SEQ ID NO: 388 - DNA, 20 bp, synthetic construct
  source 1..20: mol_type = other DNA
agcaaatttcccgagtaagc

SEQ ID NO: 389 - DNA, 20 bp, synthetic construct
  source 1..20: mol_type = other DNA
cgcccagcccctcacctcgc

SEQ ID NO: 390 - DNA, 20 bp, synthetic construct
  source 1..20: mol_type = other DNA
aaatatccaaaccgccgaag

SEQ ID NO: 391 - DNA, 20 bp, synthetic construct
  source 1..20: mol_type = other DNA
cggacctccttaagcctcac

SEQ ID NO: 392 - DNA, 20 bp, synthetic construct
  source 1..20: mol_type = other DNA
ctgcaactccattggctgcc

SEQ ID NO: 393 - DNA, 20 bp, synthetic construct
  source 1..20: mol_type = other DNA
gctgccccatgctggccctc

SEQ ID NO: 394 - DNA, 20 bp, synthetic construct
  source 1..20: mol_type = other DNA
agactgctctgtgttccccc

SEQ ID NO: 395 - DNA, 20 bp, synthetic construct
  source 1..20: mol_type = other DNA
caaggacccttcgagccccg

SEQ ID NO: 396 - DNA, 20 bp, synthetic construct
  source 1..20: mol_type = other DNA
gggtgagcacctcctcctcc

SEQ ID NO: 397 - DNA, 20 bp, synthetic construct
  source 1..20: mol_type = other DNA
gcgcctccgataggccaggc

SEQ ID NO: 398 - DNA, 20 bp, synthetic construct
  source 1..20: mol_type = other DNA
gaggaggagtcctctcctgc

SEQ ID NO: 399 - DNA, 20 bp, synthetic construct
  source 1..20: mol_type = other DNA
cggacggcccggcttgctgc

SEQ ID NO: 400 - DNA, 20 bp, synthetic construct
  source 1..20: mol_type = other DNA
ccgaacacctgcctgtcggc

SEQ ID NO: 401 - DNA, 20 bp, synthetic construct
  source 1..20: mol_type = other DNA
caaaaggccttgctgggttt

SEQ ID NO: 402 - DNA, 20 bp, synthetic construct
  source 1..20: mol_type = other DNA
gctttagtcctaccccttat

SEQ ID NO: 403 - DNA, 20 bp, synthetic construct
  source 1..20: mol_type = other DNA
cagggcctcagcctggccga

SEQ ID NO: 404 - DNA, 20 bp, synthetic construct
  source 1..20: mol_type = other DNA
tcattaatgataaggtatag

SEQ ID NO: 405 - DNA, 20 bp, synthetic construct
  source 1..20: mol_type = other DNA
aaaccaactgttctcttaga

SEQ ID NO: 406 - DNA, 20 bp, synthetic construct
  source 1..20: mol_type = other DNA
tgtgagccagggaccactgc

SEQ ID NO: 407 - DNA, 20 bp, synthetic construct
  source 1..20: mol_type = other DNA
atcctagagcttcctctccc

SEQ ID NO: 408 - DNA, 20 bp, synthetic construct
  source 1..20: mol_type = other DNA
ccccagtattgttcagcaaa

SEQ ID NO: 409 - DNA, 20 bp, synthetic construct
  source 1..20: mol_type = other DNA
gggcccaaaacagtaaggtt

SEQ ID NO: 410 - DNA, 20 bp, synthetic construct
  source 1..20: mol_type = other DNA
cttgtatcctgttgcttccc

SEQ ID NO: 411 - DNA, 20 bp, synthetic construct
  source 1..20: mol_type = other DNA
ctgaccacttggcacctttc

SEQ ID NO: 412 - DNA, 20 bp, synthetic construct
  source 1..20: mol_type = other DNA
gttacaagattctgggaagc

SEQ ID NO: 413 - DNA, 20 bp, synthetic construct
  source 1..20: mol_type = other DNA
cctctcagaagtcaaggtcc

SEQ ID NO: 414 - DNA, 20 bp, synthetic construct
  source 1..20: mol_type = other DNA
ctgccacactctccataatt

SEQ ID NO: 415 - DNA, 20 bp, synthetic construct
  source 1..20: mol_type = other DNA
gtttctgtctgcttctgttc

SEQ ID NO: 416 - DNA, 20 bp, synthetic construct
  source 1..20: mol_type = other DNA
ggcactgtccttactccaac

SEQ ID NO: 417 - DNA, 20 bp, synthetic construct
  source 1..20: mol_type = other DNA
ctaggactgtctgcttccca

SEQ ID NO: 418 - DNA, 20 bp, synthetic construct
  source 1..20: mol_type = other DNA
atgactaggaatgttaaact

SEQ ID NO: 419 - DNA, 20 bp, synthetic construct
  source 1..20: mol_type = other DNA
gctgccttcccaggcctgca

SEQ ID NO: 420 - DNA, 20 bp, synthetic construct
  source 1..20: mol_type = other DNA
ctcccgacaagctccagaac

SEQ ID NO: 421 - DNA, 20 bp, synthetic construct
  source 1..20: mol_type = other DNA
catccgctcctgcaactgcc

SEQ ID NO: 422 - DNA, 20 bp, synthetic construct
  source 1..20: mol_type = other DNA
ccaagactgatcctgcaact

SEQ ID NO: 423 - DNA, 20 bp, synthetic construct
  source 1..20: mol_type = other DNA
gcccccaaattttgtgcagg

SEQ ID NO: 424 - DNA, 20 bp, synthetic construct
  source 1..20: mol_type = other DNA
atatggctgattcaaagaat

SEQ ID NO: 425 - DNA, 20 bp, synthetic construct
  source 1..20: mol_type = other DNA
attccaggtaagagaccccc

SEQ ID NO: 426 - DNA, 20 bp, synthetic construct
  source 1..20: mol_type = other DNA
ctgctcaaaatccctccagc

SEQ ID NO: 427 - DNA, 20 bp, synthetic construct
  source 1..20: mol_type = other DNA
gagatatcaacttccttttc

SEQ ID NO: 428 - DNA, 20 bp, synthetic construct
  source 1..20: mol_type = other DNA
tgtcggtggcaccttcgaaa

SEQ ID NO: 429 - DNA, 20 bp, synthetic construct
  source 1..20: mol_type = other DNA
cacccttacttaatgcccca

SEQ ID NO: 430 - DNA, 20 bp, synthetic construct
  source 1..20: mol_type = other DNA
gcccaccgcccacagcctgc

SEQ ID NO: 431 - DNA, 20 bp, synthetic construct
  source 1..20: mol_type = other DNA
acaaaaggccttgctgggtt

SEQ ID NO: 432 - DNA, 20 bp, synthetic construct
  source 1..20: mol_type = other DNA
ccagcccatctctcagtcct

SEQ ID NO: 433 - DNA, 20 bp, synthetic construct
  source 1..20: mol_type = other DNA
agctccctaatgccctcacg

SEQ ID NO: 434 - DNA, 20 bp, synthetic construct
  source 1..20: mol_type = other DNA
gcgcaccttcccgaatgtcc

SEQ ID NO: 435 - DNA, 20 bp, synthetic construct
  source 1..20: mol_type = other DNA
tgataagcaatgcattattt

SEQ ID NO: 436 - DNA, 20 bp, synthetic construct
  source 1..20: mol_type = other DNA
tccccaaacttgctcagcag

SEQ ID NO: 437 - DNA, 20 bp, synthetic construct
  source 1..20: mol_type = other DNA
gggacagacaataaataccg

SEQ ID NO: 438 - DNA, 20 bp, synthetic construct
  source 1..20: mol_type = other DNA
ggaatgattcagccaaacta

SEQ ID NO: 439 - DNA, 20 bp, synthetic construct
  source 1..20: mol_type = other DNA
cgggtttgatgtccctgtgc

SEQ ID NO: 440 - DNA, 20 bp, synthetic construct
  source 1..20: mol_type = other DNA
agtgagcccgtcctccacca

SEQ ID NO: 441 - DNA, 20 bp, synthetic construct
  source 1..20: mol_type = other DNA
aacctatgtccctctgctgc

SEQ ID NO: 442 - DNA, 20 bp, synthetic construct
  source 1..20: mol_type = other DNA
gtagctgcctgtcccaggcc

SEQ ID NO: 443 - DNA, 20 bp, synthetic construct
  source 1..20: mol_type = other DNA
tcactgctgggtcctcagta

SEQ ID NO: 444 - DNA, 20 bp, synthetic construct
  source 1..20: mol_type = other DNA
agcttgttacacggtgaaga

SEQ ID NO: 445 - DNA, 20 bp, synthetic construct
  source 1..20: mol_type = other DNA
tatccagtacctctagattc

SEQ ID NO: 446 - DNA, 20 bp, synthetic construct
  source 1..20: mol_type = other DNA
ctgagacactaagatttccc

SEQ ID NO: 447 - DNA, 20 bp, synthetic construct
  source 1..20: mol_type = other DNA
ttgcactttgcgaaccaacg

SEQ ID NO: 448 - DNA, 20 bp, synthetic construct
  source 1..20: mol_type = other DNA
aggtttttccagaggctgaa

SEQ ID NO: 449 - DNA, 20 bp, synthetic construct
  source 1..20: mol_type = other DNA
ttatctaaagtggcccctcc

SEQ ID NO: 450 - DNA, 20 bp, synthetic construct
  source 1..20: mol_type = other DNA
aagcaaatttcccgagtaag

SEQ ID NO: 451 - DNA, 20 bp, synthetic construct
  source 1..20: mol_type = other DNA
cgaggccaaagaagaaggga

SEQ ID NO: 452 - DNA, 20 bp, synthetic construct
  source 1..20: mol_type = other DNA
gaacacggacggcccggctt

SEQ ID NO: 453 - DNA, 20 bp, synthetic construct
  source 1..20: mol_type = other DNA
cctcaccacgatgggctccg

SEQ ID NO: 454 - DNA, 20 bp, synthetic construct
  source 1..20: mol_type = other DNA
aactgccacttcagcctgtg

SEQ ID NO: 455 - DNA, 20 bp, synthetic construct
  source 1..20: mol_type = other DNA
cccgggcactcagtcttcca

SEQ ID NO: 456 - DNA, 20 bp, synthetic construct
  source 1..20: mol_type = other DNA
gcagcagcattcccggctac

SEQ ID NO: 457 - DNA, 20 bp, synthetic construct
  source 1..20: mol_type = other DNA
cggcgaacaggagcagggaa

SEQ ID NO: 458 - DNA, 20 bp, synthetic construct
  source 1..20: mol_type = other DNA
gaggacgaggtcaataaata

SEQ ID NO: 459 - DNA, 20 bp, synthetic construct
  source 1..20: mol_type = other DNA
taaatatccaaaccgccgaa

SEQ ID NO: 460 - DNA, 20 bp, synthetic construct
  source 1..20: mol_type = other DNA
ccttccttgctgagtcagga

SEQ ID NO: 461 - DNA, 20 bp, synthetic construct
  source 1..20: mol_type = other DNA
ccccagcccagagataacca

SEQ ID NO: 462 - DNA, 20 bp, synthetic construct
  source 1..20: mol_type = other DNA
gccaggtagaagcgcgccat

SEQ ID NO: 463 - DNA, 20 bp, synthetic construct
  source 1..20: mol_type = other DNA
ccgcccagcccctcacctcg

SEQ ID NO: 464 - DNA, 20 bp, synthetic construct
  source 1..20: mol_type = other DNA
catgcacaagaaagctttgc

SEQ ID NO: 465 - DNA, 20 bp, synthetic construct
  source 1..20: mol_type = other DNA
tcggacctccttaagcctca

SEQ ID NO: 466 - DNA, 20 bp, synthetic construct
  source 1..20: mol_type = other DNA
cgccgaacacctgcctgtcg

SEQ ID NO: 467 - DNA, 20 bp, synthetic construct
  source 1..20: mol_type = other DNA
gaccaccatgcctggcacga

SEQ ID NO: 468 - DNA, 20 bp, synthetic construct
  source 1..20: mol_type = other DNA
ctcaagcagctgctcggcct

SEQ ID NO: 469 - DNA, 20 bp, synthetic construct
  source 1..20: mol_type = other DNA
ctcggctgacatgttggaca

SEQ ID NO: 470 - DNA, 20 bp, synthetic construct
  source 1..20: mol_type = other DNA
ccctcttcagcatgtcccac

SEQ ID NO: 471 - DNA, 20 bp, synthetic construct
  source 1..20: mol_type = other DNA
gtgctttagtcctacccctt

SEQ ID NO: 472 - DNA, 20 bp, synthetic construct
  source 1..20: mol_type = other DNA
aagcgggtttggcaaaagca

SEQ ID NO: 473 - DNA, 20 bp, synthetic construct
  source 1..20: mol_type = other DNA
gcttggctctggccacctcc

SEQ ID NO: 474 - DNA, 20 bp, synthetic construct
  source 1..20: mol_type = other DNA
tcagggcctcagcctggccg

SEQ ID NO: 475 - DNA, 20 bp, synthetic construct
  source 1..20: mol_type = other DNA
agctgccccatgctggccct

SEQ ID NO: 476 - DNA, 20 bp, synthetic construct
  source 1..20: mol_type = other DNA
acaaggacccttcgagcccc

SEQ ID NO: 477 - DNA, 20 bp, synthetic construct
  source 1..20: mol_type = other DNA
gggcgcggcttctgtgccgt

SEQ ID NO: 478 - DNA, 20 bp, synthetic construct
  source 1..20: mol_type = other DNA
cggatcacaggactggagct

SEQ ID NO: 479 - DNA, 20 bp, synthetic construct
  source 1..20: mol_type = other DNA
cgggtgagcacctcctcctc

SEQ ID NO: 480 - DNA, 20 bp, synthetic construct
  source 1..20: mol_type = other DNA
tcgccggccgcggacccggc

SEQ ID NO: 481 - DNA, 20 bp, synthetic construct
  source 1..20: mol_type = other DNA
tcacgacaaaaggccttgct

SEQ ID NO: 482 - DNA, 20 bp, synthetic construct
  source 1..20: mol_type = other DNA
gtgataagcaatgcattatt

SEQ ID NO: 483 - DNA, 20 bp, synthetic construct
  source 1..20: mol_type = other DNA
gcctctcagaagtcaaggtc

SEQ ID NO: 484 - DNA, 20 bp, synthetic construct
  source 1..20: mol_type = other DNA
ctccaggaccttccttgctg

SEQ ID NO: 485 - DNA, 20 bp, synthetic construct
  source 1..20: mol_type = other DNA
gaaaaccaactgttctctta

SEQ ID NO: 486 - DNA, 20 bp, synthetic construct
  source 1..20: mol_type = other DNA
ggcccaccgcccacagcctg

SEQ ID NO: 487 - DNA, 20 bp, synthetic construct
  source 1..20: mol_type = other DNA
cctgaccacttggcaccttt

SEQ ID NO: 488 - DNA, 20 bp, synthetic construct
  source 1..20: mol_type = other DNA
cagtgagcccgtcctccacc

SEQ ID NO: 489 - DNA, 20 bp, synthetic construct
  source 1..20: mol_type = other DNA
ctaggtcactgctgggtcct

SEQ ID NO: 490 - DNA, 20 bp, synthetic construct
  source 1..20: mol_type = other DNA
tatgactaggaatgttaaac

SEQ ID NO: 491 - DNA, 20 bp, synthetic construct
  source 1..20: mol_type = other DNA
ctccccaaacttgctcagca

SEQ ID NO: 492 - DNA, 20 bp, synthetic construct
  source 1..20: mol_type = other DNA
cgagatatcaacttcctttt

SEQ ID NO: 493 - DNA, 20 bp, synthetic construct
  source 1..20: mol_type = other DNA
ccatccgctcctgcaactgc

SEQ ID NO: 494 - DNA, 20 bp, synthetic construct
  source 1..20: mol_type = other DNA
ctgtagcctgtcagcgagtc

SEQ ID NO: 495 - DNA, 20 bp, synthetic construct
  source 1..20: mol_type = other DNA
tccagcccatctctcagtcc

SEQ ID NO: 496 - DNA, 20 bp, synthetic construct
  source 1..20: mol_type = other DNA
ggcccccaaattttgtgcag

SEQ ID NO: 497 - DNA, 20 bp, synthetic construct
  source 1..20: mol_type = other DNA
gtgtcggtggcaccttcgaa

SEQ ID NO: 498 - DNA, 20 bp, synthetic construct
  source 1..20: mol_type = other DNA
aggcactgtccttactccaa

SEQ ID NO: 499 - DNA, 20 bp, synthetic construct
  source 1..20: mol_type = other DNA
ggtttctgtctgcttctgtt

SEQ ID NO: 500 - DNA, 20 bp, synthetic construct
  source 1..20: mol_type = other DNA
gctcccgacaagctccagaa

SEQ ID NO: 501 - DNA, 20 bp, synthetic construct
  source 1..20: mol_type = other DNA
caacctatgtccctctgctg

SEQ ID NO: 502 - DNA, 20 bp, synthetic construct
  source 1..20: mol_type = other DNA
cctgccacactctccataat

SEQ ID NO: 503 - DNA, 20 bp, synthetic construct
  source 1..20: mol_type = other DNA
ttatatggctgattcaaaga

SEQ ID NO: 504 - DNA, 20 bp, synthetic construct
  source 1..20: mol_type = other DNA
cacacccttacttaatgccc

SEQ ID NO: 505 - DNA, 20 bp, synthetic construct
  source 1..20: mol_type = other DNA
ccggatcacaggactggagc

SEQ ID NO: 506 - DNA, 20 bp, synthetic construct
  source 1..20: mol_type = other DNA
aatggttacaagattctggg

SEQ ID NO: 507 - DNA, 20 bp, synthetic construct
  source 1..20: mol_type = other DNA
aatctatcatggctcactga

SEQ ID NO: 508 - DNA, 20 bp, synthetic construct
  source 1..20: mol_type = other DNA
acagcttgttacacggtgaa

SEQ ID NO: 509 - DNA, 20 bp, synthetic construct
  source 1..20: mol_type = other DNA
gtatccagtacctctagatt

SEQ ID NO: 510 - DNA, 20 bp, synthetic construct
  source 1..20: mol_type = other DNA
agaaatagattctggttcga

SEQ ID NO: 511 - DNA, 20 bp, synthetic construct
  source 1..20: mol_type = other DNA
caatcctagagcttcctctc

SEQ ID NO: 512 - DNA, 20 bp, synthetic construct
  source 1..20: mol_type = other DNA
cgtagctgcctgtcccaggc

SEQ ID NO: 513 - DNA, 20 bp, synthetic construct
  source 1..20: mol_type = other DNA
cagctccctaatgccctcac

SEQ ID NO: 514 - DNA, 20 bp, synthetic construct
  source 1..20: mol_type = other DNA
ttcattaatgataaggtata

SEQ ID NO: 515 - DNA, 20 bp, synthetic construct
  source 1..20: mol_type = other DNA
aggaatgattcagccaaact

SEQ ID NO: 516 - DNA, 20 bp, synthetic construct
  source 1..20: mol_type = other DNA
tccccagtattgttcagcaa

SEQ ID NO: 517 - DNA, 20 bp, synthetic construct
  source 1..20: mol_type = other DNA
atttaaacatgtgtcagtac

SEQ ID NO: 518 - DNA, 20 bp, synthetic construct
  source 1..20: mol_type = other DNA
ccattccaggtaagagaccc

SEQ ID NO: 519 - DNA, 20 bp, synthetic construct
  source 1..20: mol_type = other DNA
gctgctcaaaatccctccag

SEQ ID NO: 520 - DNA, 20 bp, synthetic construct
  source 1..20: mol_type = other DNA
ggcgcaccttcccgaatgtc

SEQ ID NO: 521 - DNA, 20 bp, synthetic construct
  source 1..20: mol_type = other DNA
aaggtttttccagaggctga

SEQ ID NO: 522 - DNA, 20 bp, synthetic construct
  source 1..20: mol_type = other DNA
tgctgccttcccaggcctgc

SEQ ID NO: 523 - DNA, 20 bp, synthetic construct
  source 1..20: mol_type = other DNA
gtctgcaaagctggttctcc

SEQ ID NO: 524 - DNA, 20 bp, synthetic construct
  source 1..20: mol_type = other DNA
cctaggactgtctgcttccc

SEQ ID NO: 525 - DNA, 20 bp, synthetic construct
  source 1..20: mol_type = other DNA
cttatctaaagtggcccctc

SEQ ID NO: 526 - DNA, 20 bp, synthetic construct
  source 1..20: mol_type = other DNA
tcttgtatcctgttgcttcc

SEQ ID NO: 527 - DNA, 20 bp, synthetic construct
  source 1..20: mol_type = other DNA
tttgcactttgcgaaccaac

SEQ ID NO: 528 - DNA, 20 bp, synthetic construct
  source 1..20: mol_type = other DNA
cagctgccccatgctggccc

SEQ ID NO: 529 - DNA, 20 bp, synthetic construct
  source 1..20: mol_type = other DNA
tccaagactgatcctgcaac

SEQ ID NO: 530 - DNA, 20 bp, synthetic construct
  source 1..20: mol_type = other DNA
cgtcagggcctcagcctggc

SEQ ID NO: 531 - DNA, 20 bp, synthetic construct
  source 1..20: mol_type = other DNA
gctcaagcagctgctcggcc

SEQ ID NO: 532 - DNA, 20 bp, synthetic construct
  source 1..20: mol_type = other DNA
tgcttggctctggccacctc

SEQ ID NO: 533 - DNA, 20 bp, synthetic construct
  source 1..20: mol_type = other DNA
agcagcagcattcccggcta

SEQ ID NO: 534 - DNA, 20 bp, synthetic construct
  source 1..20: mol_type = other DNA
tacaaggacccttcgagccc

SEQ ID NO: 535 - DNA, 20 bp, synthetic construct
  source 1..20: mol_type = other DNA
gatggaacacggacggcccg

SEQ ID NO: 536 - DNA, 20 bp, synthetic construct
  source 1..20: mol_type = other DNA
aaagcaaatttcccgagtaa

SEQ ID NO: 537 - DNA, 20 bp, synthetic construct
  source 1..20: mol_type = other DNA
ccgttcgccggccgcggacc

SEQ ID NO: 538 - DNA, 20 bp, synthetic construct
  source 1..20: mol_type = other DNA
atgcagcccagggcggcggc

SEQ ID NO: 539 - DNA, 20 bp, synthetic construct
  source 1..20: mol_type = other DNA
ataaatatccaaaccgccga

SEQ ID NO: 540 - DNA, 20 bp, synthetic construct
  source 1..20: mol_type = other DNA
ccccgggcactcagtcttcc

SEQ ID NO: 541 - DNA, 20 bp, synthetic construct
  source 1..20: mol_type = other DNA
ccgggtgagcacctcctcct

SEQ ID NO: 542 - DNA, 20 bp, synthetic construct
  source 1..20: mol_type = other DNA
cacggaagcacgacacctgc

SEQ ID NO: 543 - DNA, 20 bp, synthetic construct
  source 1..20: mol_type = other DNA
atccccgaaaaagcgggttt

SEQ ID NO: 544 - DNA, 20 bp, synthetic construct
  source 1..20: mol_type = other DNA
ctggaactgccacttcagcc

SEQ ID NO: 545 - DNA, 20 bp, synthetic construct
  source 1..20: mol_type = other DNA
tcgggtttgatgtccctgca

SEQ ID NO: 546 - DNA, 20 bp, synthetic construct
  source 1..20: mol_type = other DNA
gccttttattcgcgagggtc

SEQ ID NO: 547 - DNA, 20 bp, synthetic construct
  source 1..20: mol_type = other DNA
gtcggacctccttaagcctc

SEQ ID NO: 548 - DNA, 20 bp, synthetic construct
  source 1..20: mol_type = other DNA
tcatgcacaagaaagctttg

SEQ ID NO: 549 - DNA, 20 bp, synthetic construct
  source 1..20: mol_type = other DNA
ctggcctcttaggagtcttt

SEQ ID NO: 550 - DNA, 20 bp, synthetic construct
  source 1..20: mol_type = other DNA
cgccaggtagaagcgcgcca

SEQ ID NO: 551 - DNA, 20 bp, synthetic construct
  source 1..20: mol_type = other DNA
ccatcccagtcgaggccaaa

SEQ ID NO: 552 - DNA, 20 bp, synthetic construct
  source 1..20: mol_type = other DNA
cccctcttcagcatgtccca

SEQ ID NO: 553 - DNA, 20 bp, synthetic construct
  source 1..20: mol_type = other DNA
gcctcaccacgatgggctcc

SEQ ID NO: 554 - DNA, 20 bp, synthetic construct
  source 1..20: mol_type = other DNA
gggcagagacctgcagcccc

SEQ ID NO: 555 - DNA, 20 bp, synthetic construct
  source 1..20: mol_type = other DNA
cctcggctgacatgttggac

SEQ ID NO: 556 - DNA, 20 bp, synthetic construct
  source 1..20: mol_type = other DNA
agtgctttagtcctacccct

SEQ ID NO: 557 - DNA, 20 bp, synthetic construct
  source 1..20: mol_type = other DNA
gtgggcgcggcttctgtgcc

SEQ ID NO: 558 - DNA, 20 bp, synthetic construct
  source 1..20: mol_type = other DNA
acctgccacactctccataa

SEQ ID NO: 559 - DNA, 20 bp, synthetic construct
  source 1..20: mol_type = other DNA
gaaggtttttccagaggctg

SEQ ID NO: 560 - DNA, 20 bp, synthetic construct
  source 1..20: mol_type = other DNA
ctcacgacaaaaggccttgc

SEQ ID NO: 561 - DNA, 20 bp, synthetic construct
  source 1..20: mol_type = other DNA
ctatttaaacatgtgtcagt

SEQ ID NO: 562 - DNA, 20 bp, synthetic construct
  source 1..20: mol_type = other DNA
ccctccaggaccttccttgc

SEQ ID NO: 563 - DNA, 20 bp, synthetic construct
  source 1..20: mol_type = other DNA
gctccccaaacttgctcagc

SEQ ID NO: 564 - DNA, 20 bp, synthetic construct
  source 1..20: mol_type = other DNA
ttgtgataagcaatgcatta

SEQ ID NO: 565 - DNA, 20 bp, synthetic construct
  source 1..20: mol_type = other DNA
aggcccaccgcccacagcct

SEQ ID NO: 566 - DNA, 20 bp, synthetic construct
  source 1..20: mol_type = other DNA
tgctcccgacaagctccaga

SEQ ID NO: 567 - DNA, 20 bp, synthetic construct
  source 1..20: mol_type = other DNA
gttaatggttacaagattct

SEQ ID NO: 568 - DNA, 20 bp, synthetic construct
  source 1..20: mol_type = other DNA
ctatgactaggaatgttaaa

SEQ ID NO: 569 - DNA, 20 bp, synthetic construct
  source 1..20: mol_type = other DNA
tccatccgctcctgcaactg

SEQ ID NO: 570 - DNA, 20 bp, synthetic construct
  source 1..20: mol_type = other DNA
ccctaggactgtctgcttcc

SEQ ID NO: 571 - DNA, 20 bp, synthetic construct
  source 1..20: mol_type = other DNA
tcctcacggaagcacgacac

SEQ ID NO: 572 - DNA, 20 bp, synthetic construct
  source 1..20: mol_type = other DNA
gggcccccaaattttgtgca

SEQ ID NO: 573 - DNA, 20 bp, synthetic construct
  source 1..20: mol_type = other DNA
gacagcttgttacacggtga

SEQ ID NO: 574 - DNA, 20 bp, synthetic construct
  source 1..20: mol_type = other DNA
ctgtctgcaaagctggttct

SEQ ID NO: 575 - DNA, 20 bp, synthetic construct
  source 1..20: mol_type = other DNA
ttcttgtatcctgttgcttc

SEQ ID NO: 576 - DNA, 20 bp, synthetic construct
  source 1..20: mol_type = other DNA
gttcattaatgataaggtat

SEQ ID NO: 577 - DNA, 20 bp, synthetic construct
  source 1..20: mol_type = other DNA
ttgctgccttcccaggcctg

SEQ ID NO: 578 - DNA, 20 bp, synthetic construct
  source 1..20: mol_type = other DNA
tagaaaaccaactgttctct

SEQ ID NO: 579 - DNA, 20 bp, synthetic construct
  source 1..20: mol_type = other DNA
ttccaagactgatcctgcaa

SEQ ID NO: 580 - DNA, 20 bp, synthetic construct
  source 1..20: mol_type = other DNA
cccgtagctgcctgtcccag

SEQ ID NO: 581 - DNA, 20 bp, synthetic construct
  source 1..20: mol_type = other DNA
ccagctccctaatgccctca

SEQ ID NO: 582 - DNA, 20 bp, synthetic construct
  source 1..20: mol_type = other DNA
taggcactgtccttactcca

SEQ ID NO: 583 - DNA, 20 bp, synthetic construct
  source 1..20: mol_type = other DNA
aataaatatccaaaccgccg

SEQ ID NO: 584 - DNA, 20 bp, synthetic construct
  source 1..20: mol_type = other DNA
tgctgctcaaaatccctcca

SEQ ID NO: 585 - DNA, 20 bp, synthetic construct
  source 1..20: mol_type = other DNA
cggcgcaccttcccgaatgt

SEQ ID NO: 586 - DNA, 20 bp, synthetic construct
  source 1..20: mol_type = other DNA
acgagatatcaacttccttt

SEQ ID NO: 587 - DNA, 20 bp, synthetic construct
  source 1..20: mol_type = other DNA
cgtggtttctgtctgcttct

SEQ ID NO: 588 - DNA, 20 bp, synthetic construct
  source 1..20: mol_type = other DNA
attgttatatggctgattca

SEQ ID NO: 589 - DNA, 20 bp, synthetic construct
  source 1..20: mol_type = other DNA
gcagtgagcccgtcctccac

SEQ ID NO: 590 - DNA, 20 bp, synthetic construct
  source 1..20: mol_type = other DNA
ggaatctatcatggctcact

SEQ ID NO: 591 - DNA, 20 bp, synthetic construct
  source 1..20: mol_type = other DNA
acagaaatagattctggttc

SEQ ID NO: 592 - DNA, 20 bp, synthetic construct
  source 1..20: mol_type = other DNA
tcccattccaggtaagagac

SEQ ID NO: 593 - DNA, 20 bp, synthetic construct
  source 1..20: mol_type = other DNA
caggaatgattcagccaaac

SEQ ID NO: 594 - DNA, 20 bp, synthetic construct
  source 1..20: mol_type = other DNA
gcttatctaaagtggcccct

SEQ ID NO: 595 - DNA, 20 bp, synthetic construct
  source 1..20: mol_type = other DNA
acaacctatgtccctctgct

SEQ ID NO: 596 - DNA, 20 bp, synthetic construct
  source 1..20: mol_type = other DNA
ggcctctcagaagtcaaggt

SEQ ID NO: 597 - DNA, 20 bp, synthetic construct
  source 1..20: mol_type = other DNA
ccaatcctagagcttcctct

SEQ ID NO: 598 - DNA, 20 bp, synthetic construct
  source 1..20: mol_type = other DNA
gaagacagttctagggttca

SEQ ID NO: 599 - DNA, 20 bp, synthetic construct
  source 1..20: mol_type = other DNA
ctttgcactttgcgaaccaa

SEQ ID NO: 600 - DNA, 20 bp, synthetic construct
  source 1..20: mol_type = other DNA
tctaggtcactgctgggtcc

SEQ ID NO: 601 - DNA, 20 bp, synthetic construct
  source 1..20: mol_type = other DNA
cctgtagcctgtcagcgagt

SEQ ID NO: 602 - DNA, 20 bp, synthetic construct
  source 1..20: mol_type = other DNA
atccccagtattgttcagca

SEQ ID NO: 603 - DNA, 20 bp, synthetic construct
  source 1..20: mol_type = other DNA
ttgtatccagtacctctaga

SEQ ID NO: 604 - DNA, 20 bp, synthetic construct
  source 1..20: mol_type = other DNA
gttgtgaactggcaggcggt

SEQ ID NO: 605 - DNA, 20 bp, synthetic construct
  source 1..20: mol_type = other DNA
gcttcatcttcactaccgct

SEQ ID NO: 606 - DNA, 20 bp, synthetic construct
  source 1..20: mol_type = other DNA
cccgttcgccggccgcggac

SEQ ID NO: 607 - DNA, 20 bp, synthetic construct
  source 1..20: mol_type = other DNA
cagcagcagcattcccggct

SEQ ID NO: 608 - DNA, 20 bp, synthetic construct
  source 1..20: mol_type = other DNA
ctgcttggctctggccacct

SEQ ID NO: 609 - DNA, 20 bp, synthetic construct
  source 1..20: mol_type = other DNA
ctgcagtttgcccatccacg

SEQ ID NO: 610 - DNA, 20 bp, synthetic construct
  source 1..20: mol_type = other DNA
gtcatgcacaagaaagcttt

SEQ ID NO: 611 - DNA, 20 bp, synthetic construct
  source 1..20: mol_type = other DNA
acctcggctgacatgttgga

SEQ ID NO: 612 - DNA, 20 bp, synthetic construct
  source 1..20: mol_type = other DNA
gatccccgaaaaagcgggtt

SEQ ID NO: 613 - DNA, 20 bp, synthetic construct
  source 1..20: mol_type = other DNA
ggccttttattcgcgagggt

SEQ ID NO: 614 - DNA, 20 bp, synthetic construct
  source 1..20: mol_type = other DNA
accatcccagtcgaggccaa

SEQ ID NO: 615 - DNA, 20 bp, synthetic construct
  source 1..20: mol_type = other DNA
gcccggatcacaggactgga

SEQ ID NO: 616 - DNA, 20 bp, synthetic construct
  source 1..20: mol_type = other DNA
tgggcagagacctgcagccc

SEQ ID NO: 617 - DNA, 20 bp, synthetic construct
  source 1..20: mol_type = other DNA
caagtcgaagttgcatgtgt

SEQ ID NO: 618 - DNA, 20 bp, synthetic construct
  source 1..20: mol_type = other DNA
gagtgctttagtcctacccc

SEQ ID NO: 619 - DNA, 20 bp, synthetic construct
  source 1..20: mol_type = other DNA
ccgccaggtagaagcgcgcc

SEQ ID NO: 620 - DNA, 20 bp, synthetic construct
  source 1..20: mol_type = other DNA
gctggaactgccacttcagc

SEQ ID NO: 621 - DNA, 20 bp, synthetic construct
  source 1..20: mol_type = other DNA
gtccagcccatctctcagtc

SEQ ID NO: 622 - DNA, 20 bp, synthetic construct
  source 1..20: mol_type = other DNA
agcctcaccacgatgggctc

SEQ ID NO: 623 - DNA, 20 bp, synthetic construct
  source 1..20: mol_type = other DNA
tcgacttctcagatccccag

SEQ ID NO: 624 - DNA, 20 bp, synthetic construct
  source 1..20: mol_type = other DNA
aactctggcctcttaggagt

SEQ ID NO: 625 - DNA, 20 bp, synthetic construct
  source 1..20: mol_type = other DNA
ctacaaggacccttcgagcc

SEQ ID NO: 626 - DNA, 20 bp, synthetic construct
  source 1..20: mol_type = other DNA
tgtggctcaagcagctgctc

SEQ ID NO: 627 - DNA, 20 bp, synthetic construct
  source 1..20: mol_type = other DNA
gccccgggcactcagtcttc

SEQ ID NO: 628 - DNA, 20 bp, synthetic construct
  source 1..20: mol_type = other DNA
ccacagcggtccagcaggat

SEQ ID NO: 629 - DNA, 20 bp, synthetic construct
  source 1..20: mol_type = other DNA
aggatggaacacggacggcc

SEQ ID NO: 630 - DNA, 20 bp, synthetic construct
  source 1..20: mol_type = other DNA
aaaagcaaatttcccgagta

SEQ ID NO: 631 - DNA, 20 bp, synthetic construct
  source 1..20: mol_type = other DNA
tgccgggtgagcacctcctc

SEQ ID NO: 632 - DNA, 20 bp, synthetic construct
  source 1..20: mol_type = other DNA
gcccctcttcagcatgtccc

SEQ ID NO: 633 - DNA, 20 bp, synthetic construct
  source 1..20: mol_type = other DNA
gcctgaccacttggcacctt

SEQ ID NO: 634 - DNA, 20 bp, synthetic construct
  source 1..20: mol_type = other DNA
gcagctgccccatgctggcc

SEQ ID NO: 635 - DNA, 20 bp, synthetic construct
  source 1..20: mol_type = other DNA
ggagcggttgtgaactggca

SEQ ID NO: 636 - DNA, 20 bp, synthetic construct
  source 1..20: mol_type = other DNA
tcctatgactaggaatgtta

SEQ ID NO: 637 - DNA, 20 bp, synthetic construct
  source 1..20: mol_type = other DNA
ggtccagcccatctctcagt

SEQ ID NO: 638 - DNA, 20 bp, synthetic construct
  source 1..20: mol_type = other DNA
cacctgccacactctccata

SEQ ID NO: 639 - DNA, 20 bp, synthetic construct
  source 1..20: mol_type = other DNA
agggcacccagagccgagca

SEQ ID NO: 640 - DNA, 20 bp, synthetic construct
  source 1..20: mol_type = other DNA
cagacaatagcaagggcagc

SEQ ID NO: 641 - DNA, 20 bp, synthetic construct
  source 1..20: mol_type = other DNA
tctcctcacggaagcacgac

SEQ ID NO: 642 - DNA, 20 bp, synthetic construct
  source 1..20: mol_type = other DNA
cttgtgataagcaatgcatt

SEQ ID NO: 643 - DNA, 20 bp, synthetic construct
  source 1..20: mol_type = other DNA
gccctccaggaccttccttg

SEQ ID NO: 644 - DNA, 20 bp, synthetic construct
  source 1..20: mol_type = other DNA
cacgagatatcaacttcctt

SEQ ID NO: 645 - DNA, 20 bp, synthetic construct
  source 1..20: mol_type = other DNA
caacagaaatagattctggt

SEQ ID NO: 646 - DNA, 20 bp, synthetic construct
  source 1..20: mol_type = other DNA
gtaggcactgtccttactcc

SEQ ID NO: 647 - DNA, 20 bp, synthetic construct
  source 1..20: mol_type = other DNA
tattgttatatggctgattc

SEQ ID NO: 648 - DNA, 20 bp, synthetic construct
  source 1..20: mol_type = other DNA
tccagctccctaatgccctc

SEQ ID NO: 649 - DNA, 20 bp, synthetic construct
  source 1..20: mol_type = other DNA
ggcagtgagcccgtcctcca

SEQ ID NO: 650 - DNA, 20 bp, synthetic construct
  source 1..20: mol_type = other DNA
cgggcccggatcacaggact

SEQ ID NO: 651 - DNA, 20 bp, synthetic construct
  source 1..20: mol_type = other DNA
gtctaggtcactgctgggtc

SEQ ID NO: 652 - DNA, 20 bp, synthetic construct
  source 1..20: mol_type = other DNA
agttcattaatgataaggta

SEQ ID NO: 653 - DNA, 20 bp, synthetic construct
  source 1..20: mol_type = other DNA
ggcttatctaaagtggcccc

SEQ ID NO: 654 - DNA, 20 bp, synthetic construct
  source 1..20: mol_type = other DNA
cccaatcctagagcttcctc

SEQ ID NO: 655 - DNA, 20 bp, synthetic construct
  source 1..20: mol_type = other DNA
cgaagacagttctagggttc

SEQ ID NO: 656 - DNA, 20 bp, synthetic construct
  source 1..20: mol_type = other DNA
tggaatctatcatggctcac

SEQ ID NO: 657 - DNA, 20 bp, synthetic construct
  source 1..20: mol_type = other DNA
ccgtggtttctgtctgcttc

SEQ ID NO: 658 - DNA, 20 bp, synthetic construct
  source 1..20: mol_type = other DNA
ctccatccgctcctgcaact

SEQ ID NO: 659 - DNA, 20 bp, synthetic construct
  source 1..20: mol_type = other DNA
gtcctgtagcctgtcagcga

SEQ ID NO: 660 - DNA, 20 bp, synthetic construct
  source 1..20: mol_type = other DNA
cctcacgacaaaaggccttg

SEQ ID NO: 661 - DNA, 20 bp, synthetic construct
  source 1..20: mol_type = other DNA
cgcctgaccacttggcacct

SEQ ID NO: 662 - DNA, 20 bp, synthetic construct
  source 1..20: mol_type = other DNA
cgctccccaaacttgctcag

SEQ ID NO: 663 - DNA, 20 bp, synthetic construct
  source 1..20: mol_type = other DNA
gcccgtagctgcctgtccca

SEQ ID NO: 664 - DNA, 20 bp, synthetic construct
  source 1..20: mol_type = other DNA
tcaggaatgattcagccaaa

SEQ ID NO: 665 - DNA, 20 bp, synthetic construct
  source 1..20: mol_type = other DNA
tttcttgtatcctgttgctt

SEQ ID NO: 666 - DNA, 20 bp, synthetic construct
  source 1..20: mol_type = other DNA
accctaggactgtctgcttc

SEQ ID NO: 667 - DNA, 20 bp, synthetic construct
  source 1..20: mol_type = other DNA
gctttgcactttgcgaacca

SEQ ID NO: 668 - DNA, 20 bp, synthetic construct
  source 1..20: mol_type = other DNA
cacaacctatgtccctctgc

SEQ ID NO: 669 - DNA, 20 bp, synthetic construct
  source 1..20: mol_type = other DNA
caggcccaccgcccacagcc

SEQ ID NO: 670 - DNA, 20 bp, synthetic construct
  source 1..20: mol_type = other DNA
agaaggtttttccagaggct

SEQ ID NO: 671 - DNA, 20 bp, synthetic construct
  source 1..20: mol_type = other DNA
cttgctgccttcccaggcct

SEQ ID NO: 672 - DNA, 20 bp, synthetic construct
  source 1..20: mol_type = other DNA
gcggcgcaccttcccgaatg

SEQ ID NO: 673 - DNA, 20 bp, synthetic construct
  source 1..20: mol_type = other DNA
agttaatggttacaagattc

SEQ ID NO: 674 - DNA, 20 bp, synthetic construct
  source 1..20: mol_type = other DNA
ccctgagatgttctgggaaa

SEQ ID NO: 675 - DNA, 20 bp, synthetic construct
  source 1..20: mol_type = other DNA
atactccatgaccaggtact

SEQ ID NO: 676 - DNA, 20 bp, synthetic construct
  source 1..20: mol_type = other DNA
ccccttatttacagatgaca

SEQ ID NO: 677 - DNA, 20 bp, synthetic construct
  source 1..20: mol_type = other DNA
gttccaagactgatcctgca

SEQ ID NO: 678 - DNA, 20 bp, synthetic construct
  source 1..20: mol_type = other DNA
cctgtctgcaaagctggttc

SEQ ID NO: 679 - DNA, 20 bp, synthetic construct
  source 1..20: mol_type = other DNA
ctagaaaaccaactgttctc

SEQ ID NO: 680 - DNA, 20 bp, synthetic construct
  source 1..20: mol_type = other DNA
tcttagacaaagtagcatga

SEQ ID NO: 681 - DNA, 20 bp, synthetic construct
  source 1..20: mol_type = other DNA
cttgctcccgacaagctcca

SEQ ID NO: 682 - DNA, 20 bp, synthetic construct
  source 1..20: mol_type = other DNA
tggatccccagtattgttca

SEQ ID NO: 683 - DNA, 20 bp, synthetic construct
  source 1..20: mol_type = other DNA
ctgctgctcaaaatccctcc

SEQ ID NO: 684 - DNA, 20 bp, synthetic construct
  source 1..20: mol_type = other DNA
cgtcatgcacaagaaagctt

SEQ ID NO: 685 - DNA, 20 bp, synthetic construct
  source 1..20: mol_type = other DNA
gacaatctccgccaggtaga

SEQ ID NO: 686 - DNA, 20 bp, synthetic construct
  source 1..20: mol_type = other DNA
ggcagctgccccatgctggc

SEQ ID NO: 687 - DNA, 20 bp, synthetic construct
  source 1..20: mol_type = other DNA
gtgtggctcaagcagctgct

SEQ ID NO: 688 - DNA, 20 bp, synthetic construct
  source 1..20: mol_type = other DNA
cctgcagtttgcccatccac

SEQ ID NO: 689 - DNA, 20 bp, synthetic construct
  source 1..20: mol_type = other DNA
cgcccctcttcagcatgtcc

SEQ ID NO: 690 - DNA, 20 bp, synthetic construct
  source 1..20: mol_type = other DNA
cgcacctcggctgacatgtt

SEQ ID NO: 691 - DNA, 20 bp, synthetic construct
  source 1..20: mol_type = other DNA
gttgtatccagtacctctag

SEQ ID NO: 692 - DNA, 20 bp, synthetic construct
  source 1..20: mol_type = other DNA
ggagtgctttagtcctaccc

SEQ ID NO: 693 - DNA, 20 bp, synthetic construct
  source 1..20: mol_type = other DNA
tgccccgggcactcagtctt

SEQ ID NO: 694 - DNA, 20 bp, synthetic construct
  source 1..20: mol_type = other DNA
cggttccgagcctctgcctc

SEQ ID NO: 695 - DNA, 20 bp, synthetic construct
  source 1..20: mol_type = other DNA
gctacaaggacccttcgagc

SEQ ID NO: 696 - DNA, 20 bp, synthetic construct
  source 1..20: mol_type = other DNA
ggcttgtttctccttcacca

SEQ ID NO: 697 - DNA, 20 bp, synthetic construct
  source 1..20: mol_type = other DNA
tctgcttcatcttcactacc

SEQ ID NO: 698 - DNA, 20 bp, synthetic construct
  source 1..20: mol_type = other DNA
gagccccgttcgccggccgc

SEQ ID NO: 699 - DNA, 20 bp, synthetic construct
  source 1..20: mol_type = other DNA
gaggatggaacacggacggc

SEQ ID NO: 700 - DNA, 20 bp, synthetic construct
  source 1..20: mol_type = other DNA
ggatgtggccacagcggtcc

SEQ ID NO: 701 - DNA, 20 bp, synthetic construct
  source 1..20: mol_type = other DNA
ggatccccgaaaaagcgggt

SEQ ID NO: 702 - DNA, 20 bp, synthetic construct
  source 1..20: mol_type = other DNA
taagcctcaccacgatgggc

SEQ ID NO: 703 - DNA, 20 bp, synthetic construct
  source 1..20: mol_type = other DNA
agggccttttattcgcgagg

SEQ ID NO: 704 - DNA, 20 bp, synthetic construct
  source 1..20: mol_type = other DNA
caataaatatccaaaccgcc

SEQ ID NO: 705 - DNA, 20 bp, synthetic construct
  source 1..20: mol_type = other DNA
gcagcagcagcattcccggc

SEQ ID NO: 706 - DNA, 20 bp, synthetic construct
  source 1..20: mol_type = other DNA
cctccaactctggcctctta

SEQ ID NO: 707 - DNA, 20 bp, synthetic construct
  source 1..20: mol_type = other DNA
ccaccaagtcgaagttgcat

SEQ ID NO: 708 - DNA, 20 bp, synthetic construct
  source 1..20: mol_type = other DNA
agccgctggaactgccactt

SEQ ID NO: 709 - DNA, 20 bp, synthetic construct
  source 1..20: mol_type = other DNA
gagactgcttggctctggcc

SEQ ID NO: 710 - DNA, 20 bp, synthetic construct
  source 1..20: mol_type = other DNA
caaaagcaaatttcccgagt

SEQ ID NO: 711 - DNA, 20 bp, synthetic construct
  source 1..20: mol_type = other DNA
agaccatcccagtcgaggcc

SEQ ID NO: 712 - DNA, 20 bp, synthetic construct
  source 1..20: mol_type = other DNA
ttttcttgtatcctgttgct

SEQ ID NO: 713 - DNA, 20 bp, synthetic construct
  source 1..20: mol_type = other DNA
aaagggcacccagagccgag

SEQ ID NO: 714 - DNA, 20 bp, synthetic construct
  source 1..20: mol_type = other DNA
cacagacaatagcaagggca

SEQ ID NO: 715 - DNA, 20 bp, synthetic construct
  source 1..20: mol_type = other DNA
ccaggcccaccgcccacagc

SEQ ID NO: 716 - DNA, 20 bp, synthetic construct
  source 1..20: mol_type = other DNA
ctggaatctatcatggctca

SEQ ID NO: 717 - DNA, 20 bp, synthetic construct
  source 1..20: mol_type = other DNA
acacaacctatgtccctctg

SEQ ID NO: 718 - DNA, 20 bp, synthetic construct
  source 1..20: mol_type = other DNA
tggcagtgagcccgtcctcc

SEQ ID NO: 719 - DNA, 20 bp, synthetic construct
  source 1..20: mol_type = other DNA
gcttgctgccttcccaggcc

SEQ ID NO: 720 - DNA, 20 bp, synthetic construct
  source 1..20: mol_type = other DNA
cccctgagatgttctgggaa

SEQ ID NO: 721 - DNA, 20 bp, synthetic construct
  source 1..20: mol_type = other DNA
agtctaggtcactgctgggt

SEQ ID NO: 722 - DNA, 20 bp, synthetic construct
  source 1..20: mol_type = other DNA
ccccaatcctagagcttcct

SEQ ID NO: 723 - DNA, 20 bp, synthetic construct
  source 1..20: mol_type = other DNA
agcggcgcaccttcccgaat

SEQ ID NO: 724 - DNA, 20 bp, synthetic construct
  source 1..20: mol_type = other DNA
gagttcattaatgataaggt

SEQ ID NO: 725 - DNA, 20 bp, synthetic construct
  source 1..20: mol_type = other DNA
agctttgcactttgcgaacc

SEQ ID NO: 726 - DNA, 20 bp, synthetic construct
  source 1..20: mol_type = other DNA
ctcaggaatgattcagccaa

SEQ ID NO: 727 - DNA, 20 bp, synthetic construct
  source 1..20: mol_type = other DNA
gacatgtgaccgctgcagac

SEQ ID NO: 728 - DNA, 20 bp, synthetic construct
  source 1..20: mol_type = other DNA
tccgtggtttctgtctgctt

SEQ ID NO: 729 - DNA, 20 bp, synthetic construct
  source 1..20: mol_type = other DNA
tcgaagacagttctagggtt

SEQ ID NO: 730 - DNA, 20 bp, synthetic construct
  source 1..20: mol_type = other DNA
ctccagctccctaatgccct

SEQ ID NO: 731 - DNA, 20 bp, synthetic construct
  source 1..20: mol_type = other DNA
ggtaggcactgtccttactc

SEQ ID NO: 732 - DNA, 20 bp, synthetic construct
  source 1..20: mol_type = other DNA
caccctaggactgtctgctt

SEQ ID NO: 733 - DNA, 20 bp, synthetic construct
  source 1..20: mol_type = other DNA
ccctcacgacaaaaggcctt

SEQ ID NO: 734 - DNA, 20 bp, synthetic construct
  source 1..20: mol_type = other DNA
actagaaaaccaactgttct

SEQ ID NO: 735 - DNA, 20 bp, synthetic construct
  source 1..20: mol_type = other DNA
gcctgtctgcaaagctggtt

SEQ ID NO: 736 - DNA, 20 bp, synthetic construct
  source 1..20: mol_type = other DNA
ccgctccccaaacttgctca

SEQ ID NO: 737 - DNA, 20 bp, synthetic construct
  source 1..20: mol_type = other DNA
gagaaggtttttccagaggc

SEQ ID NO: 738 - DNA, 20 bp, synthetic construct
  source 1..20: mol_type = other DNA
gtcctatgactaggaatgtt

SEQ ID NO: 739 - DNA, 20 bp, synthetic construct
  source 1..20: mol_type = other DNA
gggcttatctaaagtggccc

SEQ ID NO: 740 - DNA, 20 bp, synthetic construct
  source 1..20: mol_type = other DNA
tctgctgctcaaaatccctc

SEQ ID NO: 741 - DNA, 20 bp, synthetic construct
  source 1..20: mol_type = other DNA
ggttccaagactgatcctgc

SEQ ID NO: 742 - DNA, 20 bp, synthetic construct
  source 1..20: mol_type = other DNA
ccttgctcccgacaagctcc

SEQ ID NO: 743 - DNA, 20 bp, synthetic construct
  source 1..20: mol_type = other DNA
actccatccgctcctgcaac

SEQ ID NO: 744 - DNA, 20 bp, synthetic construct
  source 1..20: mol_type = other DNA
tctacgattccaaaactgag

SEQ ID NO: 745 - DNA, 20 bp, synthetic construct
  source 1..20: mol_type = other DNA
ggtctcagtgcatccaaaac

SEQ ID NO: 746 - DNA, 20 bp, synthetic construct
  source 1..20: mol_type = other DNA
gcacctgccacactctccat

SEQ ID NO: 747 - DNA, 20 bp, synthetic construct
  source 1..20: mol_type = other DNA
aagttaatggttacaagatt

SEQ ID NO: 748 - DNA, 20 bp, synthetic construct
  source 1..20: mol_type = other DNA
acttgtgataagcaatgcat

SEQ ID NO: 749 - DNA, 20 bp, synthetic construct
  source 1..20: mol_type = other DNA
aggtcctccaactctggcct

SEQ ID NO: 750 - DNA, 20 bp, synthetic construct
  source 1..20: mol_type = other DNA
aatactccatgaccaggtac

SEQ ID NO: 751 - DNA, 20 bp, synthetic construct
  source 1..20: mol_type = other DNA
tcacgagatatcaacttcct

SEQ ID NO: 752 - DNA, 20 bp, synthetic construct
  source 1..20: mol_type = other DNA
tctcttagacaaagtagcat

SEQ ID NO: 753 - DNA, 20 bp, synthetic construct
  source 1..20: mol_type = other DNA
agccctccaggaccttcctt

SEQ ID NO: 754 - DNA, 20 bp, synthetic construct
  source 1..20: mol_type = other DNA
ctaccccttatttacagatg

SEQ ID NO: 755 - DNA, 20 bp, synthetic construct
  source 1..20: mol_type = other DNA
ttattgttatatggctgatt

SEQ ID NO: 756 - DNA, 20 bp, synthetic construct
  source 1..20: mol_type = other DNA
ctctcctcacggaagcacga

SEQ ID NO: 757 - DNA, 20 bp, synthetic construct
  source 1..20: mol_type = other DNA
tcaataaatatccaaaccgc

SEQ ID NO: 758 - DNA, 20 bp, synthetic construct
  source 1..20: mol_type = other DNA
cggctacaaggacccttcga

SEQ ID NO: 759 - DNA, 20 bp, synthetic construct
  source 1..20: mol_type = other DNA
ggttgtatccagtacctcta

SEQ ID NO: 760 - DNA, 20 bp, synthetic construct
  source 1..20: mol_type = other DNA
gtggaggatggaacacggac

SEQ ID NO: 761 - DNA, 20 bp, synthetic construct
  source 1..20: mol_type = other DNA
accaacttactgtttcatcc

SEQ ID NO: 762 - DNA, 20 bp, synthetic construct
  source 1..20: mol_type = other DNA
aggctctcgcctgaccactt

SEQ ID NO: 763 - DNA, 20 bp, synthetic construct
  source 1..20: mol_type = other DNA
gacccacgctcggagcggtt

SEQ ID NO: 764 - DNA, 20 bp, synthetic construct
  source 1..20: mol_type = other DNA
atgacaatctccgccaggta

SEQ ID NO: 765 - DNA, 20 bp, synthetic construct
  source 1..20: mol_type = other DNA
ccgcacctcggctgacatgt

SEQ ID NO: 766 - DNA, 20 bp, synthetic construct
  source 1..20: mol_type = other DNA
aggagtgctttagtcctacc

SEQ ID NO: 767 - DNA, 20 bp, synthetic construct
  source 1..20: mol_type = other DNA
ccgaaagaaagaaatggtct

SEQ ID NO: 768 - DNA, 20 bp, synthetic construct
  source 1..20: mol_type = other DNA
cggatgtggccacagcggtc

SEQ ID NO: 769 - DNA, 20 bp, synthetic construct
  source 1..20: mol_type = other DNA
cctggcagctgccccatgct

SEQ ID NO: 770 - DNA, 20 bp, synthetic construct
  source 1..20: mol_type = other DNA
gcaaaagcaaatttcccgag

SEQ ID NO: 771 - DNA, 20 bp, synthetic construct
  source 1..20: mol_type = other DNA
tcgagccccgttcgccggcc

SEQ ID NO: 772 - DNA, 20 bp, synthetic construct
  source 1..20: mol_type = other DNA
gcctgcagtttgcccatcca

SEQ ID NO: 773 - DNA, 20 bp, synthetic construct
  source 1..20: mol_type = other DNA
cgggatccccgaaaaagcgg

SEQ ID NO: 774 - DNA, 20 bp, synthetic construct
  source 1..20: mol_type = other DNA
cgtctgcttcatcttcacta

SEQ ID NO: 775 - DNA, 20 bp, synthetic construct
  source 1..20: mol_type = other DNA
gagaccatcccagtcgaggc

SEQ ID NO: 776 - DNA, 20 bp, synthetic construct
  source 1..20: mol_type = other DNA
gcgggcccggatcacaggac

SEQ ID NO: 777 - DNA, 20 bp, synthetic construct
  source 1..20: mol_type = other DNA
ccatggcttgtttctccttc

SEQ ID NO: 778 - DNA, 20 bp, synthetic construct
  source 1..20: mol_type = other DNA
cgcagggacagccgctggaa

SEQ ID NO: 779 - DNA, 20 bp, synthetic construct
  source 1..20: mol_type = other DNA
ccggttccgagcctctgcct

SEQ ID NO: 780 - DNA, 20 bp, synthetic construct
  source 1..20: mol_type = other DNA
gagggccttttattcgcgag

SEQ ID NO: 781 - DNA, 20 bp, synthetic construct
  source 1..20: mol_type = other DNA
ctccaccaagtcgaagttgc

SEQ ID NO: 782 - DNA, 20 bp, synthetic construct
  source 1..20: mol_type = other DNA
ttaagcctcaccacgatggg

SEQ ID NO: 783 - DNA, 20 bp, synthetic construct
  source 1..20: mol_type = other DNA
gtggttcttgaaccacactt

SEQ ID NO: 784 - DNA, 20 bp, synthetic construct
  source 1..20: mol_type = other DNA
gctcaccttgtagtggacga

SEQ ID NO: 785 - DNA, 20 bp, synthetic construct
  source 1..20: mol_type = other DNA
gtgccccgggcactcagtct

SEQ ID NO: 786 - DNA, 20 bp, synthetic construct
  source 1..20: mol_type = other DNA
acgctccccagagcagggcg

SEQ ID NO: 787 - DNA, 20 bp, synthetic construct
  source 1..20: mol_type = other DNA
tcgcccctcttcagcatgtc

SEQ ID NO: 788 - DNA, 20 bp, synthetic construct
  source 1..20: mol_type = other DNA
tccataattctctaattctc

SEQ ID NO: 789 - DNA, 20 bp, synthetic construct
  source 1..20: mol_type = other DNA
cttattgttatatggctgat

SEQ ID NO: 790 - DNA, 20 bp, synthetic construct
  source 1..20: mol_type = other DNA
ggcttgctgccttcccaggc

SEQ ID NO: 791 - DNA, 20 bp, synthetic construct
  source 1..20: mol_type = other DNA
ggactgtaagtctaggtcac

SEQ ID NO: 792 - DNA, 20 bp, synthetic construct
  source 1..20: mol_type = other DNA
gctggaatctatcatggctc

SEQ ID NO: 793 - DNA, 20 bp, synthetic construct
  source 1..20: mol_type = other DNA
taatactccatgaccaggta

SEQ ID NO: 794 - DNA, 20 bp, synthetic construct
  source 1..20: mol_type = other DNA
aaaagggcacccagagccga

SEQ ID NO: 795 - DNA, 20 bp, synthetic construct
  source 1..20: mol_type = other DNA
cgcctgtctgcaaagctggt

SEQ ID NO: 796 - DNA, 20 bp, synthetic construct
  source 1..20: mol_type = other DNA
gtcgaagacagttctagggt

SEQ ID NO: 797 - DNA, 20 bp, synthetic construct
  source 1..20: mol_type = other DNA
aggattcccacctgcccaag

SEQ ID NO: 798 - DNA, 20 bp, synthetic construct
  source 1..20: mol_type = other DNA
tgactagaaaaccaactgtt

SEQ ID NO: 799 - DNA, 20 bp, synthetic construct
  source 1..20: mol_type = other DNA
ctctgctgctcaaaatccct

SEQ ID NO: 800 - DNA, 20 bp, synthetic construct
  source 1..20: mol_type = other DNA
aagctttgcactttgcgaac

SEQ ID NO: 801 - DNA, 20 bp, synthetic construct
  source 1..20: mol_type = other DNA
tctcaggaatgattcagcca

SEQ ID NO: 802 - DNA, 20 bp, synthetic construct
  source 1..20: mol_type = other DNA
cttgacatgtgaccgctgca

SEQ ID NO: 803 - DNA, 20 bp, synthetic construct
  source 1..20: mol_type = other DNA
ccctctcctcacggaagcac

SEQ ID NO: 804 - DNA, 20 bp, synthetic construct
  source 1..20: mol_type = other DNA
actctacgattccaaaactg

SEQ ID NO: 805 - DNA, 20 bp, synthetic construct
  source 1..20: mol_type = other DNA
cagggcttatctaaagtggc

SEQ ID NO: 806 - DNA, 20 bp, synthetic construct
  source 1..20: mol_type = other DNA
attcactccccctgagatgt

SEQ ID NO: 807 - DNA, 20 bp, synthetic construct
  source 1..20: mol_type = other DNA
atggcagtgagcccgtcctc

SEQ ID NO: 808 - DNA, 20 bp, synthetic construct
  source 1..20: mol_type = other DNA
tacttgtgataagcaatgca

SEQ ID NO: 809 - DNA, 20 bp, synthetic construct
  source 1..20: mol_type = other DNA
aacacaacctatgtccctct

SEQ ID NO: 810 - DNA, 20 bp, synthetic construct
  source 1..20: mol_type = other DNA
aactccatccgctcctgcaa

SEQ ID NO: 811 - DNA, 20 bp, synthetic construct
  source 1..20: mol_type = other DNA
tggagttcattaatgataag

SEQ ID NO: 812 - DNA, 20 bp, synthetic construct
  source 1..20: mol_type = other DNA
ggtcctatgactaggaatgt

SEQ ID NO: 813 - DNA, 20 bp, synthetic construct
  source 1..20: mol_type = other DNA
tcaccctaggactgtctgct

SEQ ID NO: 814 - DNA, 20 bp, synthetic construct
  source 1..20: mol_type = other DNA
gtcaataaatatccaaaccg

SEQ ID NO: 815 - DNA, 20 bp, synthetic construct
  source 1..20: mol_type = other DNA
aggtaggcactgtccttact

SEQ ID NO: 816 - DNA, 20 bp, synthetic construct
  source 1..20: mol_type = other DNA
cccccaatcctagagcttcc

SEQ ID NO: 817 - DNA, 20 bp, synthetic construct
  source 1..20: mol_type = other DNA
cctaccccttatttacagat

SEQ ID NO: 818 - DNA, 20 bp, synthetic construct
  source 1..20: mol_type = other DNA
cctccagctccctaatgccc

SEQ ID NO: 819 - DNA, 20 bp, synthetic construct
  source 1..20: mol_type = other DNA
aaagccctccaggaccttcc

SEQ ID NO: 820 - DNA, 20 bp, synthetic construct
  source 1..20: mol_type = other DNA
aaggtcctccaactctggcc

SEQ ID NO: 821 - DNA, 20 bp, synthetic construct
  source 1..20: mol_type = other DNA
agcacagacaatagcaaggg

SEQ ID NO: 822 - DNA, 20 bp, synthetic construct
  source 1..20: mol_type = other DNA
ttctcttagacaaagtagca

SEQ ID NO: 823 - DNA, 20 bp, synthetic construct
  source 1..20: mol_type = other DNA
ctcacgagatatcaacttcc

SEQ ID NO: 824 - DNA, 20 bp, synthetic construct
  source 1..20: mol_type = other DNA
ccccttgctcccgacaagct

SEQ ID NO: 825 - DNA, 20 bp, synthetic construct
  source 1..20: mol_type = other DNA
tgggagaaggtttttccaga

SEQ ID NO: 826 - DNA, 20 bp, synthetic construct
  source 1..20: mol_type = other DNA
ctccgtggtttctgtctgct

SEQ ID NO: 827 - DNA, 20 bp, synthetic construct
  source 1..20: mol_type = other DNA
ggcgggcccggatcacagga

SEQ ID NO: 828 - DNA, 20 bp, synthetic construct
  source 1..20: mol_type = other DNA
gccctcacgacaaaaggcct

SEQ ID NO: 829 - DNA, 20 bp, synthetic construct
  source 1..20: mol_type = other DNA
tttttcttgtatcctgttgc

SEQ ID NO: 830 - DNA, 20 bp, synthetic construct
  source 1..20: mol_type = other DNA
cccaggcccaccgcccacag

SEQ ID NO: 831 - DNA, 20 bp, synthetic construct
  source 1..20: mol_type = other DNA
tagcggcgcaccttcccgaa

SEQ ID NO: 832 - DNA, 20 bp, synthetic construct
  source 1..20: mol_type = other DNA
agttctgaagtcctgtggct

SEQ ID NO: 833 - DNA, 20 bp, synthetic construct
  source 1..20: mol_type = other DNA
aaggttccaagactgatcct

SEQ ID NO: 834 - DNA, 20 bp, synthetic construct
  source 1..20: mol_type = other DNA
gggcacctgccacactctcc

SEQ ID NO: 835 - DNA, 20 bp, synthetic construct
  source 1..20: mol_type = other DNA
catgacaatctccgccaggt

SEQ ID NO: 836 - DNA, 20 bp, synthetic construct
  source 1..20: mol_type = other DNA
cctcagccgcacctcggctg

SEQ ID NO: 837 - DNA, 20 bp, synthetic construct
  source 1..20: mol_type = other DNA
cccggctacaaggacccttc

SEQ ID NO: 838 - DNA, 20 bp, synthetic construct
  source 1..20: mol_type = other DNA
cggagaccatcccagtcgag

SEQ ID NO: 839 - DNA, 20 bp, synthetic construct
  source 1..20: mol_type = other DNA
gaggagtgctttagtcctac

SEQ ID NO: 840 - DNA, 20 bp, synthetic construct
  source 1..20: mol_type = other DNA
ttccatggcttgtttctcct

SEQ ID NO: 841 - DNA, 20 bp, synthetic construct
  source 1..20: mol_type = other DNA
ccgtctgcttcatcttcact

SEQ ID NO: 842 - DNA, 20 bp, synthetic construct
  source 1..20: mol_type = other DNA
tcacctcgcccctcttcagc

SEQ ID NO: 843 - DNA, 20 bp, synthetic construct
  source 1..20: mol_type = other DNA
tccaccaacttactgtttca

SEQ ID NO: 844 - DNA, 20 bp, synthetic construct
  source 1..20: mol_type = other DNA
gcgggatccccgaaaaagcg

SEQ ID NO: 845 - DNA, 20 bp, synthetic construct
  source 1..20: mol_type = other DNA
gcagagatcgcgccagacgc

SEQ ID NO: 846 - DNA, 20 bp, synthetic construct
  source 1..20: mol_type = other DNA
ggagggccttttattcgcga

SEQ ID NO: 847 - DNA, 20 bp, synthetic construct
  source 1..20: mol_type = other DNA
tcagcctctgccgcagggac

SEQ ID NO: 848 - DNA, 20 bp, synthetic construct
  source 1..20: mol_type = other DNA
ctccataattctctaattct

SEQ ID NO: 849 - DNA, 20 bp, synthetic construct
  source 1..20: mol_type = other DNA
ggcaaaagcaaatttcccga

SEQ ID NO: 850 - DNA, 20 bp, synthetic construct
  source 1..20: mol_type = other DNA
gcgaaccaacgataggtggg

SEQ ID NO: 851 - DNA, 20 bp, synthetic construct
  source 1..20: mol_type = other DNA
gccgaaagaaagaaatggtc

SEQ ID NO: 852 - DNA, 20 bp, synthetic construct
  source 1..20: mol_type = other DNA
gggttgtatccagtacctct

SEQ ID NO: 853 - DNA, 20 bp, synthetic construct
  source 1..20: mol_type = other DNA
tccgctccccaaacttgctc

SEQ ID NO: 854 - DNA, 20 bp, synthetic construct
  source 1..20: mol_type = other DNA
cccggttccgagcctctgcc

SEQ ID NO: 855 - DNA, 20 bp, synthetic construct
  source 1..20: mol_type = other DNA
aataaataccgaggaatgtc

SEQ ID NO: 856 - DNA, 20 bp, synthetic construct
  source 1..20: mol_type = other DNA
cgtgccccgggcactcagtc

SEQ ID NO: 857 - DNA, 20 bp, synthetic construct
  source 1..20: mol_type = other DNA
ggtggttcttgaaccacact

SEQ ID NO: 858 - DNA, 20 bp, synthetic construct
  source 1..20: mol_type = other DNA
tcctccaccaagtcgaagtt

SEQ ID NO: 859 - DNA, 20 bp, synthetic construct
  source 1..20: mol_type = other DNA
ttcgagccccgttcgccggc

SEQ ID NO: 860 - DNA, 20 bp, synthetic construct
  source 1..20: mol_type = other DNA
cttaagcctcaccacgatgg

SEQ ID NO: 861 - DNA, 20 bp, synthetic construct
  source 1..20: mol_type = other DNA
aggcctgcagtttgcccatc

SEQ ID NO: 862 - DNA, 20 bp, synthetic construct
  source 1..20: mol_type = other DNA
cgtgctcaccttgtagtgga

SEQ ID NO: 863 - DNA, 20 bp, synthetic construct
  source 1..20: mol_type = other DNA
ggagacccacgctcggagcg

SEQ ID NO: 864 - DNA, 20 bp, synthetic construct
  source 1..20: mol_type = other DNA
ccctggcagctgccccatgc

SEQ ID NO: 865 - DNA, 20 bp, synthetic construct
  source 1..20: mol_type = other DNA
gcggatgtggccacagcggt

SEQ ID NO: 866 - DNA, 20 bp, synthetic construct
  source 1..20: mol_type = other DNA
caataaataccgaggaatgt

SEQ ID NO: 867 - DNA, 20 bp, synthetic construct
  source 1..20: mol_type = other DNA
acccccaatcctagagcttc

SEQ ID NO: 868 - DNA, 20 bp, synthetic construct
  source 1..20: mol_type = other DNA
ttctcaggaatgattcagcc

SEQ ID NO: 869 - DNA, 20 bp, synthetic construct
  source 1..20: mol_type = other DNA
agggcacctgccacactctc

SEQ ID NO: 870 - DNA, 20 bp, synthetic construct
  source 1..20: mol_type = other DNA
gctggagttcattaatgata

SEQ ID NO: 871 - DNA, 20 bp, synthetic construct
  source 1..20: mol_type = other DNA
ccggcttgctgccttcccag

SEQ ID NO: 872 - DNA, 20 bp, synthetic construct
  source 1..20: mol_type = other DNA
atccgctccccaaacttgct

SEQ ID NO: 873 - DNA, 20 bp, synthetic construct
  source 1..20: mol_type = other DNA
tcaggattcccacctgccca

SEQ ID NO: 874 - DNA, 20 bp, synthetic construct
  source 1..20: mol_type = other DNA
ttacttgtgataagcaatgc

SEQ ID NO: 875 - DNA, 20 bp, synthetic construct
  source 1..20: mol_type = other DNA
tggactgtaagtctaggtca

SEQ ID NO: 876 - DNA, 20 bp, synthetic construct
  source 1..20: mol_type = other DNA
aatgttgtccagtaataaaa

SEQ ID NO: 877 - DNA, 20 bp, synthetic construct
  source 1..20: mol_type = other DNA
catggcagtgagcccgtcct

SEQ ID NO: 878 - DNA, 20 bp, synthetic construct
  source 1..20: mol_type = other DNA
aaagctttgcactttgcgaa

SEQ ID NO: 879 - DNA, 20 bp, synthetic construct
  source 1..20: mol_type = other DNA
cctctgctgctcaaaatccc

SEQ ID NO: 880 - DNA, 20 bp, synthetic construct
  source 1..20: mol_type = other DNA
aaggtcctatgactaggaat

SEQ ID NO: 881 - DNA, 20 bp, synthetic construct
  source 1..20: mol_type = other DNA
caaaagggcacccagagccg

SEQ ID NO: 882 - DNA, 20 bp, synthetic construct
  source 1..20: mol_type = other DNA
ccttattgttatatggctga

SEQ ID NO: 883 - DNA, 20 bp, synthetic construct
  source 1..20: mol_type = other DNA
taacacaacctatgtccctc

SEQ ID NO: 884 - DNA, 20 bp, synthetic construct
  source 1..20: mol_type = other DNA
gcgcctgtctgcaaagctgg

SEQ ID NO: 885 - DNA, 20 bp, synthetic construct
  source 1..20: mol_type = other DNA
gttctcttagacaaagtagc

SEQ ID NO: 886 - DNA, 20 bp, synthetic construct
  source 1..20: mol_type = other DNA
cgaatgtccgacagtgtctc

SEQ ID NO: 887 - DNA, 20 bp, synthetic construct
  source 1..20: mol_type = other DNA
gaaagccctccaggaccttc

SEQ ID NO: 888 - DNA, 20 bp, synthetic construct
  source 1..20: mol_type = other DNA
atgtagaatgtcctgggtaa

SEQ ID NO: 889 - DNA, 20 bp, synthetic construct
  source 1..20: mol_type = other DNA
gcaactccatccgctcctgc

SEQ ID NO: 890 - DNA, 20 bp, synthetic construct
  source 1..20: mol_type = other DNA
aaggtaggcactgtccttac

SEQ ID NO: 891 - DNA, 20 bp, synthetic construct
  source 1..20: mol_type = other DNA
tgccctcacgacaaaaggcc

SEQ ID NO: 892 - DNA, 20 bp, synthetic construct
  source 1..20: mol_type = other DNA
taaggtcctccaactctggc

SEQ ID NO: 893 - DNA, 20 bp, synthetic construct
  source 1..20: mol_type = other DNA
ggtcaataaatatccaaacc

SEQ ID NO: 894 - DNA, 20 bp, synthetic construct
  source 1..20: mol_type = other DNA
gactctacgattccaaaact

SEQ ID NO: 895 - DNA, 20 bp, synthetic construct
  source 1..20: mol_type = other DNA
ccttgacatgtgaccgctgc

SEQ ID NO: 896 - DNA, 20 bp, synthetic construct
  source 1..20: mol_type = other DNA
ttcaccctaggactgtctgc

SEQ ID NO: 897 - DNA, 20 bp, synthetic construct
  source 1..20: mol_type = other DNA
cattttttcttgtatcctgt

SEQ ID NO: 898 - DNA, 20 bp, synthetic construct
  source 1..20: mol_type = other DNA
gtaatactccatgaccaggt

SEQ ID NO: 899 - DNA, 20 bp, synthetic construct
  source 1..20: mol_type = other DNA
agattcactccccctgagat

SEQ ID NO: 900 - DNA, 20 bp, synthetic construct
  source 1..20: mol_type = other DNA
cataatttaacactcttcaa

SEQ ID NO: 901 - DNA, 20 bp, synthetic construct
  source 1..20: mol_type = other DNA
tcctaccccttatttacaga

SEQ ID NO: 902 - DNA, 20 bp, synthetic construct
  source 1..20: mol_type = other DNA
ccctccagctccctaatgcc

SEQ ID NO: 903 - DNA, 20 bp, synthetic construct
  source 1..20: mol_type = other DNA
cggagtcgaagacagttcta

SEQ ID NO: 904 - DNA, 20 bp, synthetic construct
  source 1..20: mol_type = other DNA
tccaagttctgaagtcctgt

SEQ ID NO: 905 - DNA, 20 bp, synthetic construct
  source 1..20: mol_type = other DNA
taaggttccaagactgatcc

SEQ ID NO: 906 - DNA, 20 bp, synthetic construct
  source 1..20: mol_type = other DNA
ggctggaatctatcatggct

SEQ ID NO: 907 - DNA, 20 bp, synthetic construct
  source 1..20: mol_type = other DNA
tccctctcctcacggaagca

SEQ ID NO: 908 - DNA, 20 bp, synthetic construct
  source 1..20: mol_type = other DNA
tcccaggcccaccgcccaca

SEQ ID NO: 909 - DNA, 20 bp, synthetic construct
  source 1..20: mol_type = other DNA
gccacaaaaggagtgctcct

SEQ ID NO: 910 - DNA, 20 bp, synthetic construct
  source 1..20: mol_type = other DNA
cccgtctgcttcatcttcac

SEQ ID NO: 911 - DNA, 20 bp, synthetic construct
  source 1..20: mol_type = other DNA
tggagggccttttattcgcg

SEQ ID NO: 912 - DNA, 20 bp, synthetic construct
  source 1..20: mol_type = other DNA
gcctcagccgcacctcggct

SEQ ID NO: 913 - DNA, 20 bp, synthetic construct
  source 1..20: mol_type = other DNA
gccgtgctcaccttgtagtg

SEQ ID NO: 914 - DNA, 20 bp, synthetic construct
  source 1..20: mol_type = other DNA
ctcacctcgcccctcttcag

SEQ ID NO: 915 - DNA, 20 bp, synthetic construct
  source 1..20: mol_type = other DNA
gctcacgagatatcaacttc

SEQ ID NO: 916 - DNA, 20 bp, synthetic construct
  source 1..20: mol_type = other DNA
ccggagaccatcccagtcga

SEQ ID NO: 917 - DNA, 20 bp, synthetic construct
  source 1..20: mol_type = other DNA
ctctccataattctctaatt

SEQ ID NO: 918 - DNA, 20 bp, synthetic construct
  source 1..20: mol_type = other DNA
ccctccctccccggccgcta

SEQ ID NO: 919 - DNA, 20 bp, synthetic construct
  source 1..20: mol_type = other DNA
ccttaagcctcaccacgatg

SEQ ID NO: 920 - DNA, 20 bp, synthetic construct
  source 1..20: mol_type = other DNA
cgcgggatccccgaaaaagc

SEQ ID NO: 921 - DNA, 20 bp, synthetic construct
  source 1..20: mol_type = other DNA
gtcctccaccaagtcgaagt

SEQ ID NO: 922 - DNA, 20 bp, synthetic construct
  source 1..20: mol_type = other DNA
ctcagcctctgccgcaggga

SEQ ID NO: 923 - DNA, 20 bp, synthetic construct
  source 1..20: mol_type = other DNA
cccactgtaactacagagac

SEQ ID NO: 924 - DNA, 20 bp, synthetic construct
  source 1..20: mol_type = other DNA
cctccaccaacttactgttt

SEQ ID NO: 925 - DNA, 20 bp, synthetic construct
  source 1..20: mol_type = other DNA
aggtggttcttgaaccacac

SEQ ID NO: 926 - DNA, 20 bp, synthetic construct
  source 1..20: mol_type = other DNA
caggcagagatcgcgccaga

SEQ ID NO: 927 - DNA, 20 bp, synthetic construct
  source 1..20: mol_type = other DNA
gcacctttccttccatggct

SEQ ID NO: 928 - DNA, 20 bp, synthetic construct
  source 1..20: mol_type = other DNA
cttcgagccccgttcgccgg

SEQ ID NO: 929 - DNA, 20 bp, synthetic construct
  source 1..20: mol_type = other DNA
tggcaaaagcaaatttcccg

SEQ ID NO: 930 - DNA, 20 bp, synthetic construct
  source 1..20: mol_type = other DNA
tctcagtcctccaggaggag

SEQ ID NO: 931 - DNA, 20 bp, synthetic construct
  source 1..20: mol_type = other DNA
gttccatctgcccgcagctt

SEQ ID NO: 932 - DNA, 20 bp, synthetic construct
  source 1..20: mol_type = other DNA
ggcagcaccatggcccctcc

SEQ ID NO: 933 - DNA, 20 bp, synthetic construct
  source 1..20: mol_type = other DNA
ccgtgccccgggcactcagt

SEQ ID NO: 934 - DNA, 20 bp, synthetic construct
  source 1..20: mol_type = other DNA
ctaggtcccggttccgagcc

SEQ ID NO: 935 - DNA, 20 bp, synthetic construct
  source 1..20: mol_type = other DNA
cccacaaaaggcaggtggac

SEQ ID NO: 936 - DNA, 20 bp, synthetic construct
  source 1..20: mol_type = other DNA
ggccgaaagaaagaaatggt

SEQ ID NO: 937 - DNA, 20 bp, synthetic construct
  source 1..20: mol_type = other DNA
caggcctgcagtttgcccat

SEQ ID NO: 938 - DNA, 20 bp, synthetic construct
  source 1..20: mol_type = other DNA
tgcgaaccaacgataggtgg

SEQ ID NO: 939 - DNA, 20 bp, synthetic construct
  source 1..20: mol_type = other DNA
ctgcgcccctggcagctgcc

SEQ ID NO: 940 - DNA, 20 bp, synthetic construct
  source 1..20: mol_type = other DNA
ccatgacaatctccgccagg

SEQ ID NO: 941 - DNA, 20 bp, synthetic construct
  source 1..20: mol_type = other DNA
tcccggctacaaggaccctt

SEQ ID NO: 942 - DNA, 20 bp, synthetic construct
  source 1..20: mol_type = other DNA
cggagacccacgctcggagc

SEQ ID NO: 943 - DNA, 20 bp, synthetic construct
  source 1..20: mol_type = other DNA
acaataaataccgaggaatg

SEQ ID NO: 944 - DNA, 20 bp, synthetic construct
  source 1..20: mol_type = other DNA
ccggagtcgaagacagttct

SEQ ID NO: 945 - DNA, 20 bp, synthetic construct
  source 1..20: mol_type = other DNA
taatgttgtccagtaataaa

SEQ ID NO: 946 - DNA, 20 bp, synthetic construct
  source 1..20: mol_type = other DNA
gaaagctttgcactttgcga

SEQ ID NO: 947 - DNA, 20 bp, synthetic construct
  source 1..20: mol_type = other DNA
gtccctctcctcacggaagc

SEQ ID NO: 948 - DNA, 20 bp, synthetic construct
  source 1..20: mol_type = other DNA
tggcccctccagcatttttt

SEQ ID NO: 949 - DNA, 20 bp, synthetic construct
  source 1..20: mol_type = other DNA
aggctggaatctatcatggc

SEQ ID NO: 950 - DNA, 20 bp, synthetic construct
  source 1..20: mol_type = other DNA
cttaatgccccactgtaact

SEQ ID NO: 951 - DNA, 20 bp, synthetic construct
  source 1..20: mol_type = other DNA
ctaacacaacctatgtccct

SEQ ID NO: 952 - DNA, 20 bp, synthetic construct
  source 1..20: mol_type = other DNA
ccgaatgtccgacagtgtct

SEQ ID NO: 953 - DNA, 20 bp, synthetic construct
  source 1..20: mol_type = other DNA
cccacagcctgcaggatctc

SEQ ID NO: 954 - DNA, 20 bp, synthetic construct
  source 1..20: mol_type = other DNA
accatggcagtgagcccgtc

SEQ ID NO: 955 - DNA, 20 bp, synthetic construct
  source 1..20: mol_type = other DNA
atttacttgtgataagcaat

SEQ ID NO: 956 - DNA, 20 bp, synthetic construct
  source 1..20: mol_type = other DNA
tttccaagttctgaagtcct

SEQ ID NO: 957 - DNA, 20 bp, synthetic construct
  source 1..20: mol_type = other DNA
tcagggcacctgccacactc

SEQ ID NO: 958 - DNA, 20 bp, synthetic construct
  source 1..20: mol_type = other DNA
aggtcaataaatatccaaac

SEQ ID NO: 959 - DNA, 20 bp, synthetic construct
  source 1..20: mol_type = other DNA
cttctgttcaggaagtccct

SEQ ID NO: 960 - DNA, 20 bp, synthetic construct
  source 1..20: mol_type = other DNA
ccataatttaacactcttca

SEQ ID NO: 961 - DNA, 20 bp, synthetic construct
  source 1..20: mol_type = other DNA
attcaggaccccagaaggta

SEQ ID NO: 962 - DNA, 20 bp, synthetic construct
  source 1..20: mol_type = other DNA
tcccttgacatgtgaccgct

SEQ ID NO: 963 - DNA, 20 bp, synthetic construct
  source 1..20: mol_type = other DNA
gcttcaccctaggactgtct

SEQ ID NO: 964 - DNA, 20 bp, synthetic construct
  source 1..20: mol_type = other DNA
cagattcactccccctgaga

SEQ ID NO: 965 - DNA, 20 bp, synthetic construct
  source 1..20: mol_type = other DNA
gcaaaagggcacccagagcc

SEQ ID NO: 966 - DNA, 20 bp, synthetic construct
  source 1..20: mol_type = other DNA
actctccataattctctaat

SEQ ID NO: 967 - DNA, 20 bp, synthetic construct
  source 1..20: mol_type = other DNA
caaggtcctatgactaggaa

SEQ ID NO: 968 - DNA, 20 bp, synthetic construct
  source 1..20: mol_type = other DNA
agaaagccctccaggacctt

SEQ ID NO: 969 - DNA, 20 bp, synthetic construct
  source 1..20: mol_type = other DNA
ggactctacgattccaaaac

SEQ ID NO: 970 - DNA, 20 bp, synthetic construct
  source 1..20: mol_type = other DNA
gccttctcaggaatgattca

SEQ ID NO: 971 - DNA, 20 bp, synthetic construct
  source 1..20: mol_type = other DNA
gtcctaccccttatttacag

SEQ ID NO: 972 - DNA, 20 bp, synthetic construct
  source 1..20: mol_type = other DNA
gccttattgttatatggctg

SEQ ID NO: 973 - DNA, 20 bp, synthetic construct
  source 1..20: mol_type = other DNA
cacccccaatcctagagctt

SEQ ID NO: 974 - DNA, 20 bp, synthetic construct
  source 1..20: mol_type = other DNA
atcaggattcccacctgccc

SEQ ID NO: 975 - DNA, 20 bp, synthetic construct
  source 1..20: mol_type = other DNA
gtaaggttccaagactgatc

SEQ ID NO: 976 - DNA, 20 bp, synthetic construct
  source 1..20: mol_type = other DNA
agctcacgagatatcaactt

SEQ ID NO: 977 - DNA, 20 bp, synthetic construct
  source 1..20: mol_type = other DNA
gtcccaggcccaccgcccac

SEQ ID NO: 978 - DNA, 20 bp, synthetic construct
  source 1..20: mol_type = other DNA
ccctctgctgctcaaaatcc

SEQ ID NO: 979 - DNA, 20 bp, synthetic construct
  source 1..20: mol_type = other DNA
aatgccctcacgacaaaagg

SEQ ID NO: 980 - DNA, 20 bp, synthetic construct
  source 1..20: mol_type = other DNA
tccctccagctccctaatgc

SEQ ID NO: 981 - DNA, 20 bp, synthetic construct
  source 1..20: mol_type = other DNA
catgtagaatgtcctgggta

SEQ ID NO: 982 - DNA, 20 bp, synthetic construct
  source 1..20: mol_type = other DNA
ttaaggtcctccaactctgg

SEQ ID NO: 983 - DNA, 20 bp, synthetic construct
  source 1..20: mol_type = other DNA
tgttctcttagacaaagtag

SEQ ID NO: 984 - DNA, 20 bp, synthetic construct
  source 1..20: mol_type = other DNA
ggccacaaaaggagtgctcc

SEQ ID NO: 985 - DNA, 20 bp, synthetic construct
  source 1..20: mol_type = other DNA
gttcaatcctgacccaccgt

SEQ ID NO: 986 - DNA, 20 bp, synthetic construct
  source 1..20: mol_type = other DNA
tgtcggctgcgcccctggca

SEQ ID NO: 987 - DNA, 20 bp, synthetic construct
  source 1..20: mol_type = other DNA
cccggcttgctgccttccca

SEQ ID NO: 988 - DNA, 20 bp, synthetic construct
  source 1..20: mol_type = other DNA
gccatgacaatctccgccag

SEQ ID NO: 989 - DNA, 20 bp, synthetic construct
  source 1..20: mol_type = other DNA
tgaccttactctgcccctcc

SEQ ID NO: 990 - DNA, 20 bp, synthetic construct
  source 1..20: mol_type = other DNA
gcagtgtcagcaggtccccg

SEQ ID NO: 991 - DNA, 20 bp, synthetic construct
  source 1..20: mol_type = other DNA
tctctcagtcctccaggagg

SEQ ID NO: 992 - DNA, 20 bp, synthetic construct
  source 1..20: mol_type = other DNA
tgcctctaggtcccggttcc

SEQ ID NO: 993 - DNA, 20 bp, synthetic construct
  source 1..20: mol_type = other DNA
gcccacaaaaggcaggtgga

SEQ ID NO: 994 - DNA, 20 bp, synthetic construct
  source 1..20: mol_type = other DNA
caggcagcaccatggcccct

SEQ ID NO: 995 - DNA, 20 bp, synthetic construct
  source 1..20: mol_type = other DNA
cctcacctcgcccctcttca

SEQ ID NO: 996 - DNA, 20 bp, synthetic construct
  source 1..20: mol_type = other DNA
cccggcccagccgtgtctcc

SEQ ID NO: 997 - DNA, 20 bp, synthetic construct
  source 1..20: mol_type = other DNA
ccaggcctgcagtttgccca

SEQ ID NO: 998 - DNA, 20 bp, synthetic construct
  source 1..20: mol_type = other DNA
cgtcctccaccaagtcgaag

SEQ ID NO: 999 - DNA, 20 bp, synthetic construct
  source 1..20: mol_type = other DNA
gcgcgggatccccgaaaaag

SEQ ID NO: 1000 - DNA, 20 bp, synthetic construct
  source 1..20: mol_type = other DNA
acccggcccctccctccccg

SEQ ID NO: 1001 - DNA, 20 bp, synthetic construct
  source 1..20: mol_type = other DNA
ggcacctttccttccatggc

SEQ ID NO: 1002 - DNA, 20 bp, synthetic construct
  source 1..20: mol_type = other DNA
ttggcaaaagcaaatttccc

SEQ ID NO: 1003 - DNA, 20 bp, synthetic construct
  source 1..20: mol_type = other DNA
gcccgtctgcttcatcttca

SEQ ID NO: 1004 - DNA, 20 bp, synthetic construct
  source 1..20: mol_type = other DNA
tccttaagcctcaccacgat

SEQ ID NO: 1005 - DNA, 20 bp, synthetic construct
  source 1..20: mol_type = other DNA
ctggactgtaagtctaggtc

SEQ ID NO: 1006 - DNA, 20 bp, synthetic construct
  source 1..20: mol_type = other DNA
cctggccgaaagaaagaaat

SEQ ID NO: 1007 - DNA, 20 bp, synthetic construct
  source 1..20: mol_type = other DNA
ttgcgaaccaacgataggtg

SEQ ID NO: 1008 - DNA, 20 bp, synthetic construct
  source 1..20: mol_type = other DNA
cccggagaccatcccagtcg

SEQ ID NO: 1009 - DNA, 20 bp, synthetic construct
  source 1..20: mol_type = other DNA
cggcctcagcctctgccgca

SEQ ID NO: 1010 - DNA, 20 bp, synthetic construct
  source 1..20: mol_type = other DNA
cccaaagttgtccctcctgg

SEQ ID NO: 1011 - DNA, 20 bp, synthetic construct
  source 1..20: mol_type = other DNA
ccttcgagccccgttcgccg

SEQ ID NO: 1012 - DNA, 20 bp, synthetic construct
  source 1..20: mol_type = other DNA
aagcaggcagagatcgcgcc

SEQ ID NO: 1013 - DNA, 20 bp, synthetic construct
  source 1..20: mol_type = other DNA
gcggagacccacgctcggag

SEQ ID NO: 1014 - DNA, 20 bp, synthetic construct
  source 1..20: mol_type = other DNA
atggagggccttttattcgc

SEQ ID NO: 1015 - DNA, 20 bp, synthetic construct
  source 1..20: mol_type = other DNA
agcaactccatccgctcctg

SEQ ID NO: 1016 - DNA, 20 bp, synthetic construct
  source 1..20: mol_type = other DNA
gtgccgtgccccgggcactc

SEQ ID NO: 1017 - DNA, 20 bp, synthetic construct
  source 1..20: mol_type = other DNA
gcaggtggttcttgaaccac

SEQ ID NO: 1018 - DNA, 20 bp, synthetic construct
  source 1..20: mol_type = other DNA
cggaatccgctccccaaact

SEQ ID NO: 1019 - DNA, 20 bp, synthetic construct
  source 1..20: mol_type = other DNA
ttcccggctacaaggaccct

SEQ ID NO: 1020 - DNA, 20 bp, synthetic construct
  source 1..20: mol_type = other DNA
gacaataaataccgaggaat

SEQ ID NO: 1021 - DNA, 20 bp, synthetic construct
  source 1..20: mol_type = other DNA
cccgaatgtccgacagtgtc

SEQ ID NO: 1022 - DNA, 20 bp, synthetic construct
  source 1..20: mol_type = other DNA
gtgtaatgttgtccagtaat

SEQ ID NO: 1023 - DNA, 20 bp, synthetic construct
  source 1..20: mol_type = other DNA
aatttacttgtgataagcaa

SEQ ID NO: 1024 - DNA, 20 bp, synthetic construct
  source 1..20: mol_type = other DNA
actggactgtaagtctaggt

SEQ ID NO: 1025 - DNA, 20 bp, synthetic construct
  source 1..20: mol_type = other DNA
agtgattcaggaccccagaa

SEQ ID NO: 1026 - DNA, 20 bp, synthetic construct
  source 1..20: mol_type = other DNA
actgttctcttagacaaagt

SEQ ID NO: 1027 - DNA, 20 bp, synthetic construct
  source 1..20: mol_type = other DNA
tccataatttaacactcttc

SEQ ID NO: 1028 - DNA, 20 bp, synthetic construct
  source 1..20: mol_type = other DNA
agtggcccctccagcatttt

SEQ ID NO: 1029 - DNA, 20 bp, synthetic construct
  source 1..20: mol_type = other DNA
gcttctgttcaggaagtccc

SEQ ID NO: 1030 - DNA, 20 bp, synthetic construct
  source 1..20: mol_type = other DNA
ggccttattgttatatggct

SEQ ID NO: 1031 - DNA, 20 bp, synthetic construct
  source 1..20: mol_type = other DNA
atctctcagtcctccaggag

SEQ ID NO: 1032 - DNA, 20 bp, synthetic construct
  source 1..20: mol_type = other DNA
agcttcaccctaggactgtc

SEQ ID NO: 1033 - DNA, 20 bp, synthetic construct
  source 1..20: mol_type = other DNA
tcatgtagaatgtcctgggt

SEQ ID NO: 1034 - DNA, 20 bp, synthetic construct
  source 1..20: mol_type = other DNA
cccggagtcgaagacagttc

SEQ ID NO: 1035 - DNA, 20 bp, synthetic construct
  source 1..20: mol_type = other DNA
actaacacaacctatgtccc

SEQ ID NO: 1036 - DNA, 20 bp, synthetic construct
  source 1..20: mol_type = other DNA
agcaaaagggcacccagagc

SEQ ID NO: 1037 - DNA, 20 bp, synthetic construct
  source 1..20: mol_type = other DNA
aagaaagctttgcactttgc

SEQ ID NO: 1038 - DNA, 20 bp, synthetic construct
  source 1..20: mol_type = other DNA
agtcctaccccttatttaca

SEQ ID NO: 1039 - DNA, 20 bp, synthetic construct
  source 1..20: mol_type = other DNA
agtaaggttccaagactgat

SEQ ID NO: 1040 - DNA, 20 bp, synthetic construct
  source 1..20: mol_type = other DNA
tggcaccttcgaaatccggt

SEQ ID NO: 1041 - DNA, 20 bp, synthetic construct
  source 1..20: mol_type = other DNA
taggctggaatctatcatgg

SEQ ID NO: 1042 - DNA, 20 bp, synthetic construct
  source 1..20: mol_type = other DNA
gaggtcaataaatatccaaa

SEQ ID NO: 1043 - DNA, 20 bp, synthetic construct
  source 1..20: mol_type = other DNA
aaatccctccagctccctaa

SEQ ID NO: 1044 - DNA, 20 bp, synthetic construct
  source 1..20: mol_type = other DNA
ctcccttgacatgtgaccgc

SEQ ID NO: 1045 - DNA, 20 bp, synthetic construct
  source 1..20: mol_type = other DNA
tacttaatgccccactgtaa

SEQ ID NO: 1046 - DNA, 20 bp, synthetic construct
  source 1..20: mol_type = other DNA
gcccacagcctgcaggatct

SEQ ID NO: 1047 - DNA, 20 bp, synthetic construct
  source 1..20: mol_type = other DNA
cgtccctctcctcacggaag

SEQ ID NO: 1048 - DNA, 20 bp, synthetic construct
  source 1..20: mol_type = other DNA
aggactctacgattccaaaa

SEQ ID NO: 1049 - DNA, 20 bp, synthetic construct
  source 1..20: mol_type = other DNA
attttccaagttctgaagtc

SEQ ID NO: 1050 - DNA, 20 bp, synthetic construct
  source 1..20: mol_type = other DNA
gcagattcactccccctgag

SEQ ID NO: 1051 - DNA, 20 bp, synthetic construct
  source 1..20: mol_type = other DNA
cttggcacctttccttccat

SEQ ID NO: 1052 - DNA, 20 bp, synthetic construct
  source 1..20: mol_type = other DNA
aatcaggattcccacctgcc

SEQ ID NO: 1053 - DNA, 20 bp, synthetic construct
  source 1..20: mol_type = other DNA
tcaaggtcctatgactagga

SEQ ID NO: 1054 - DNA, 20 bp, synthetic construct
  source 1..20: mol_type = other DNA
tccctctgctgctcaaaatc

SEQ ID NO: 1055 - DNA, 20 bp, synthetic construct
  source 1..20: mol_type = other DNA
tgtcccaggcccaccgccca

SEQ ID NO: 1056 - DNA, 20 bp, synthetic construct
  source 1..20: mol_type = other DNA
agccttctcaggaatgattc

SEQ ID NO: 1057 - DNA, 20 bp, synthetic construct
  source 1..20: mol_type = other DNA
ctaatgccctcacgacaaaa

SEQ ID NO: 1058 - DNA, 20 bp, synthetic construct
  source 1..20: mol_type = other DNA
atttaaggtcctccaactct

SEQ ID NO: 1059 - DNA, 20 bp, synthetic construct
  source 1..20: mol_type = other DNA
agcacccccaatcctagagc

SEQ ID NO: 1060 - DNA, 20 bp, synthetic construct
  source 1..20: mol_type = other DNA
cccaggcctgcagtttgccc

SEQ ID NO: 1061 - DNA, 20 bp, synthetic construct
  source 1..20: mol_type = other DNA
gcccggcttgctgccttccc

SEQ ID NO: 1062 - DNA, 20 bp, synthetic construct
  source 1..20: mol_type = other DNA
gtgcctctaggtcccggttc

SEQ ID NO: 1063 - DNA, 20 bp, synthetic construct
  source 1..20: mol_type = other DNA
agatggagggccttttattc

SEQ ID NO: 1064 - DNA, 20 bp, synthetic construct
  source 1..20: mol_type = other DNA
ccccggcccagccgtgtctc

SEQ ID NO: 1065 - DNA, 20 bp, synthetic construct
  source 1..20: mol_type = other DNA
gcctggccgaaagaaagaaa

SEQ ID NO: 1066 - DNA, 20 bp, synthetic construct
  source 1..20: mol_type = other DNA
cccgctcaccatggcagtga

SEQ ID NO: 1067 - DNA, 20 bp, synthetic construct
  source 1..20: mol_type = other DNA
gcccttttaaggcagcagga

SEQ ID NO: 1068 - DNA, 20 bp, synthetic construct
  source 1..20: mol_type = other DNA
gctcagatagctccccactc

SEQ ID NO: 1069 - DNA, 20 bp, synthetic construct
  source 1..20: mol_type = other DNA
ggccatgacaatctccgcca

SEQ ID NO: 1070 - DNA, 20 bp, synthetic construct
  source 1..20: mol_type = other DNA
ctgtcggctgcgcccctggc

SEQ ID NO: 1071 - DNA, 20 bp, synthetic construct
  source 1..20: mol_type = other DNA
gtagcccacaaaaggcaggt

SEQ ID NO: 1072 - DNA, 20 bp, synthetic construct
  source 1..20: mol_type = other DNA
tttgcgaaccaacgataggt

SEQ ID NO: 1073 - DNA, 20 bp, synthetic construct
  source 1..20: mol_type = other DNA
ctggcccgtctgcttcatct

SEQ ID NO: 1074 - DNA, 20 bp, synthetic construct
  source 1..20: mol_type = other DNA
ctcagcagtgtcagcaggtc

SEQ ID NO: 1075 - DNA, 20 bp, synthetic construct
  source 1..20: mol_type = other DNA
ccggaatccgctccccaaac

SEQ ID NO: 1076 - DNA, 20 bp, synthetic construct
  source 1..20: mol_type = other DNA
taagcaggcagagatcgcgc

SEQ ID NO: 1077 - DNA, 20 bp, synthetic construct
  source 1..20: mol_type = other DNA
ccactgccatctggtgagct

SEQ ID NO: 1078 - DNA, 20 bp, synthetic construct
  source 1..20: mol_type = other DNA
attcccggctacaaggaccc

SEQ ID NO: 1079 - DNA, 20 bp, synthetic construct
  source 1..20: mol_type = other DNA
cctcctccaggtgtctatac

SEQ ID NO: 1080 - DNA, 20 bp, synthetic construct
  source 1..20: mol_type = other DNA
cctctagattcagatgcagg

SEQ ID NO: 1081 - DNA, 20 bp, synthetic construct
  source 1..20: mol_type = other DNA
ggcgcgggatccccgaaaaa

SEQ ID NO: 1082 - DNA, 20 bp, synthetic construct
  source 1..20: mol_type = other DNA
acaggcagcaccatggcccc

SEQ ID NO: 1083 - DNA, 20 bp, synthetic construct
  source 1..20: mol_type = other DNA
ctgaccttactctgcccctc

SEQ ID NO: 1084 - DNA, 20 bp, synthetic construct
  source 1..20: mol_type = other DNA
ctccttaagcctcaccacga

SEQ ID NO: 1085 - DNA, 20 bp, synthetic construct
  source 1..20: mol_type = other DNA
cccttcgagccccgttcgcc

SEQ ID NO: 1086 - DNA, 20 bp, synthetic construct
  source 1..20: mol_type = other DNA
agctatcctggacatgcgcc

SEQ ID NO: 1087 - DNA, 20 bp, synthetic construct
  source 1..20: mol_type = other DNA
ggcggagacccacgctcgga

SEQ ID NO: 1088 - DNA, 20 bp, synthetic construct
  source 1..20: mol_type = other DNA
ctgtgccgtgccccgggcac

SEQ ID NO: 1089 - DNA, 20 bp, synthetic construct
  source 1..20: mol_type = other DNA
tttggcaaaagcaaatttcc

SEQ ID NO: 1090 - DNA, 20 bp, synthetic construct
  source 1..20: mol_type = other DNA
tgcttcccttcagggcacct

SEQ ID NO: 1091 - DNA, 20 bp, synthetic construct
  source 1..20: mol_type = other DNA
cactctccataattctctaa

SEQ ID NO: 1092 - DNA, 20 bp, synthetic construct
  source 1..20: mol_type = other DNA
gctcataggaaccgagactt

SEQ ID NO: 1093 - DNA, 20 bp, synthetic construct
  source 1..20: mol_type = other DNA
ccctcacctcgcccctcttc

SEQ ID NO: 1094 - DNA, 20 bp, synthetic construct
  source 1..20: mol_type = other DNA
ccgtcctccaccaagtcgaa

SEQ ID NO: 1095 - DNA, 20 bp, synthetic construct
  source 1..20: mol_type = other DNA
gcggacccggcccctccctc

SEQ ID NO: 1096 - DNA, 20 bp, synthetic construct
  source 1..20: mol_type = other DNA
tcggcctcagcctctgccgc

SEQ ID NO: 1097 - DNA, 20 bp, synthetic construct
  source 1..20: mol_type = other DNA
caaattttgtgcaggtgggg

SEQ ID NO: 1098 - DNA, 20 bp, synthetic construct
  source 1..20: mol_type = other DNA
cccaaattttgtgcaggtgg

SEQ ID NO: 1099 - DNA, 20 bp, synthetic construct
  source 1..20: mol_type = other DNA
atcctacaatggttcgggca

SEQ ID NO: 1100 - DNA, 20 bp, synthetic construct
  source 1..20: mol_type = other DNA
tcatattttccaccaacctc

SEQ ID NO: 1101 - DNA, 20 bp, synthetic construct
  source 1..20: mol_type = other DNA
ctccatgtatgattctacaa

SEQ ID NO: 1102 - DNA, 20 bp, synthetic construct
  source 1..20: mol_type = other DNA
cagccacttcagatatgtca

SEQ ID NO: 1103 - DNA, 20 bp, synthetic construct
  source 1..20: mol_type = other DNA
gtgcaatcctgcatttgtcc

SEQ ID NO: 1104 - DNA, 20 bp, synthetic construct
  source 1..20: mol_type = other DNA
gggcctgtctgtcctctgca

SEQ ID NO: 1105 - DNA, 20 bp, synthetic construct
  source 1..20: mol_type = other DNA
ctgcatcctaatggcatata

SEQ ID NO: 1106 - DNA, 20 bp, synthetic construct
  source 1..20: mol_type = other DNA
gggcccgagccgccctccgc

SEQ ID NO: 1107 - DNA, 20 bp, synthetic construct
  source 1..20: mol_type = other DNA
ccatcatagatctttctagt

SEQ ID NO: 1108 - DNA, 20 bp, synthetic construct
  source 1..20: mol_type = other DNA
gcttgttgaggtcaatggac

SEQ ID NO: 1109 - DNA, 20 bp, synthetic construct
  source 1..20: mol_type = other DNA
ccgttggctcccacgacgac

SEQ ID NO: 1110 - DNA, 20 bp, synthetic construct
  source 1..20: mol_type = other DNA
cctcttttcctcatccaatc

SEQ ID NO: 1111 - DNA, 20 bp, synthetic construct
  source 1..20: mol_type = other DNA
gcgcagtcccccatggcggc

SEQ ID NO: 1112 - DNA, 20 bp, synthetic construct
  source 1..20: mol_type = other DNA
ctggttgggaggagatgccc

SEQ ID NO: 1113 - DNA, 20 bp, synthetic construct
  source 1..20: mol_type = other DNA
tggtcttgtcgatcaaccgc

SEQ ID NO: 1114 - DNA, 20 bp, synthetic construct
  source 1..20: mol_type = other DNA
ctgcaaaatgggcagcacac

SEQ ID NO: 1115 - DNA, 20 bp, synthetic construct
  source 1..20: mol_type = other DNA
cagggctcaggtgagcccca

SEQ ID NO: 1116 - DNA, 20 bp, synthetic construct
  source 1..20: mol_type = other DNA
gcagcctctctcaagcaggg

SEQ ID NO: 1117 - DNA, 20 bp, synthetic construct
  source 1..20: mol_type = other DNA
ccacttcagatatgtcacct

SEQ ID NO: 1118 - DNA, 20 bp, synthetic construct
  source 1..20: mol_type = other DNA
ctcctcattgaacagcttgc

SEQ ID NO: 1119 - DNA, 20 bp, synthetic construct
  source 1..20: mol_type = other DNA
gccacagaattgtcctgtat

SEQ ID NO: 1120 - DNA, 20 bp, synthetic construct
  source 1..20: mol_type = other DNA
gggttctcaccacatcgctt

SEQ ID NO: 1121 - DNA, 20 bp, synthetic construct
  source 1..20: mol_type = other DNA
cttgcatcacctcatgattc

SEQ ID NO: 1122 - DNA, 20 bp, synthetic construct
  source 1..20: mol_type = other DNA
agatccgcttgtcaattggc

SEQ ID NO: 1123 - DNA, 20 bp, synthetic construct
  source 1..20: mol_type = other DNA
gcagctgcatcctaatggca

SEQ ID NO: 1124 - DNA, 20 bp, synthetic construct
  source 1..20: mol_type = other DNA
atccactgactgttccgttc

SEQ ID NO: 1125 - DNA, 20 bp, synthetic construct
  source 1..20: mol_type = other DNA
gtcctttttgatgagatcca

SEQ ID NO: 1126 - DNA, 20 bp, synthetic construct
  source 1..20: mol_type = other DNA
ccgcttgtcaattggcttgt

SEQ ID NO: 1127 - DNA, 20 bp, synthetic construct
  source 1..20: mol_type = other DNA
gaagcgatctttgtttggtt

SEQ ID NO: 1128 - DNA, 20 bp, synthetic construct
  source 1..20: mol_type = other DNA
ccatcatgtccaatagtcac

SEQ ID NO: 1129 - DNA, 20 bp, synthetic construct
  source 1..20: mol_type = other DNA
ctcctcttcgccgctccgct

SEQ ID NO: 1130 - DNA, 20 bp, synthetic construct
  source 1..20: mol_type = other DNA
tcagatatgtcaccttggtc

SEQ ID NO: 1131 - DNA, 20 bp, synthetic construct
  source 1..20: mol_type = other DNA
gggcttgcatcacctcatga

SEQ ID NO: 1132 - DNA, 20 bp, synthetic construct
  source 1..20: mol_type = other DNA
cagctcctactcatagccag

SEQ ID NO: 1133 - DNA, 20 bp, synthetic construct
  source 1..20: mol_type = other DNA
ccgagccgccctccgcgccg

SEQ ID NO: 1134 - DNA, 20 bp, synthetic construct
  source 1..20: mol_type = other DNA
gtctcatgtagtcaatggcc

SEQ ID NO: 1135 - DNA, 20 bp, synthetic construct
  source 1..20: mol_type = other DNA
atccgcttgtcaattggctt

SEQ ID NO: 1136 - DNA, 20 bp, synthetic construct
  source 1..20: mol_type = other DNA
tcctcattgaacagcttgct

SEQ ID NO: 1137 - DNA, 20 bp, synthetic construct
  source 1..20: mol_type = other DNA
ctgcactggccacacggctt

SEQ ID NO: 1138 - DNA, 20 bp, synthetic construct
  source 1..20: mol_type = other DNA
acggcttctgtgcaatcctg

SEQ ID NO: 1139 - DNA, 20 bp, synthetic construct
  source 1..20: mol_type = other DNA
ctacgattccaaaactgagg

SEQ ID NO: 1140 - DNA, 20 bp, synthetic construct
  source 1..20: mol_type = other DNA
tgctctgtgaagtatcagcc

SEQ ID NO: 1141 - DNA, 20 bp, synthetic construct
  source 1..20: mol_type = other DNA
cccctcttttcctcatccaa

SEQ ID NO: 1142 - DNA, 20 bp, synthetic construct
  source 1..20: mol_type = other DNA
gcgccgcccgccgccatctt

SEQ ID NO: 1143 - DNA, 20 bp, synthetic construct
  source 1..20: mol_type = other DNA
ctgcatttgtcctagctggc

SEQ ID NO: 1144 - DNA, 20 bp, synthetic construct
  source 1..20: mol_type = other DNA
cctccatcctttcagcaccc

SEQ ID NO: 1145 - DNA, 20 bp, synthetic construct
  source 1..20: mol_type = other DNA
gatctttgtttggttcacta

SEQ ID NO: 1146 - DNA, 20 bp, synthetic construct
  source 1..20: mol_type = other DNA
cctcacttgtcctccaaaac

SEQ ID NO: 1147 - DNA, 20 bp, synthetic construct
  source 1..20: mol_type = other DNA
gtccaatagtcaccatccca

SEQ ID NO: 1148 - DNA, 20 bp, synthetic construct
  source 1..20: mol_type = other DNA
cgctccgctccccatcagca

SEQ ID NO: 1149 - DNA, 20 bp, synthetic construct
  source 1..20: mol_type = other DNA
gctcaatctcaagacccctc

SEQ ID NO: 1150 - DNA, 20 bp, synthetic construct
  source 1..20: mol_type = other DNA
gaaacagaaacatttcgggg

SEQ ID NO: 1151 - DNA, 20 bp, synthetic construct
  source 1..20: mol_type = other DNA
gcttgccacagaattgtcct

SEQ ID NO: 1152 - DNA, 20 bp, synthetic construct
  source 1..20: mol_type = other DNA
acacttctgtatccactggt

SEQ ID NO: 1153 - DNA, 20 bp, synthetic construct
  source 1..20: mol_type = other DNA
tgtccttcttggctgggtgt

SEQ ID NO: 1154 - DNA, 20 bp, synthetic construct
  source 1..20: mol_type = other DNA
ctctgttctaagaggtgatg

SEQ ID NO: 1155 - DNA, 20 bp, synthetic construct
  source 1..20: mol_type = other DNA
gaggtcattgtacttggcag

SEQ ID NO: 1156 - DNA, 20 bp, synthetic construct
  source 1..20: mol_type = other DNA
cacgcaataatcaaagtcct

SEQ ID NO: 1157 - DNA, 20 bp, synthetic construct
  source 1..20: mol_type = other DNA
agtataaataagaggtcctg

SEQ ID NO: 1158 - DNA, 20 bp, synthetic construct
  source 1..20: mol_type = other DNA
gagcaatctccatgtatgat

SEQ ID NO: 1159 - DNA, 20 bp, synthetic construct
  source 1..20: mol_type = other DNA
cagcacacttctgtatccac

SEQ ID NO: 1160 - DNA, 20 bp, synthetic construct
  source 1..20: mol_type = other DNA
gaccaggtcatcttcgccac

SEQ ID NO: 1161 - DNA, 20 bp, synthetic construct
  source 1..20: mol_type = other DNA
cctctgggcttgcatcacct

SEQ ID NO: 1162 - DNA, 20 bp, synthetic construct
  source 1..20: mol_type = other DNA
gcgatctttgtttggttcac

SEQ ID NO: 1163 - DNA, 20 bp, synthetic construct
  source 1..20: mol_type = other DNA
gaacagtagtggtccgtggc

SEQ ID NO: 1164 - DNA, 20 bp, synthetic construct
  source 1..20: mol_type = other DNA
gctccccatcagcaccggct

SEQ ID NO: 1165 - DNA, 20 bp, synthetic construct
  source 1..20: mol_type = other DNA
tctccgactcaggcagccac

SEQ ID NO: 1166 - DNA, 20 bp, synthetic construct
  source 1..20: mol_type = other DNA
gagcagtccctgcccgcgga

SEQ ID NO: 1167 - DNA, 20 bp, synthetic construct
  source 1..20: mol_type = other DNA
tccgttcactcccttcagcc

SEQ ID NO: 1168 - DNA, 20 bp, synthetic construct
  source 1..20: mol_type = other DNA
gtcatcttcgccacccgtca

SEQ ID NO: 1169 - DNA, 20 bp, synthetic construct
  source 1..20: mol_type = other DNA
tccttcatattttccaccaa

SEQ ID NO: 1170 - DNA, 20 bp, synthetic construct
  source 1..20: mol_type = other DNA
ctcgatgtcccatctttggc

SEQ ID NO: 1171 - DNA, 20 bp, synthetic construct
  source 1..20: mol_type = other DNA
catccttcatattttccacc

SEQ ID NO: 1172 - DNA, 20 bp, synthetic construct
  source 1..20: mol_type = other DNA
agacaatagcaagggcagct

SEQ ID NO: 1173 - DNA, 20 bp, synthetic construct
  source 1..20: mol_type = other DNA
gaaatagattctggttcgag

SEQ ID NO: 1174 - DNA, 20 bp, synthetic construct
  source 1..20: mol_type = other DNA
ccaaattttgtgcaggtggg

SEQ ID NO: 1175 - DNA, 20 bp, synthetic construct
  source 1..20: mol_type = other DNA
gaggtcaatggacttgaggg

SEQ ID NO: 1176 - DNA, 20 bp, synthetic construct
  source 1..20: mol_type = other DNA
gcttgtcaattggcttgttg

SEQ ID NO: 1177 - DNA, 20 bp, synthetic construct
  source 1..20: mol_type = other DNA
cagcgcaccattcaatcctc

SEQ ID NO: 1178 - DNA, 20 bp, synthetic construct
  source 1..20: mol_type = other DNA
cgcaggcagctgcatcctaa

SEQ ID NO: 1179 - DNA, 20 bp, synthetic construct
  source 1..20: mol_type = other DNA
tccgctccccatcagcaccg

SEQ ID NO: 1180 - DNA, 20 bp, synthetic construct
  source 1..20: mol_type = other DNA
atcctgcatttgtcctagct

SEQ ID NO: 1181 - DNA, 20 bp, synthetic construct
  source 1..20: mol_type = other DNA
tggttgggaggagatgccct

SEQ ID NO: 1182 - DNA, 20 bp, synthetic construct
  source 1..20: mol_type = other DNA
gcagcacacttctgtatcca

SEQ ID NO: 1183 - DNA, 20 bp, synthetic construct
  source 1..20: mol_type = other DNA
ttgccacagaattgtcctgt

SEQ ID NO: 1184 - DNA, 20 bp, synthetic construct
  source 1..20: mol_type = other DNA
ccttcatattttccaccaac

SEQ ID NO: 1185 - DNA, 20 bp, synthetic construct
  source 1..20: mol_type = other DNA
atgtccaatagtcaccatcc

SEQ ID NO: 1186 - DNA, 20 bp, synthetic construct
  source 1..20: mol_type = other DNA
cgagccgccctccgcgccgc

SEQ ID NO: 1187 - DNA, 20 bp, synthetic construct
  source 1..20: mol_type = other DNA
aggtcattgtacttggcagt

SEQ ID NO: 1188 - DNA, 20 bp, synthetic construct
  source 1..20: mol_type = other DNA
cgcctactatgaccttccca

SEQ ID NO: 1189 - DNA, 20 bp, synthetic construct
  source 1..20: mol_type = other DNA
agcgatctttgtttggttca

SEQ ID NO: 1190 - DNA, 20 bp, synthetic construct
  source 1..20: mol_type = other DNA
tcccacctcatctcagatac

SEQ ID NO: 1191 - DNA, 20 bp, synthetic construct
  source 1..20: mol_type = other DNA
ggctctccgactcaggcagc

SEQ ID NO: 1192 - DNA, 20 bp, synthetic construct
  source 1..20: mol_type = other DNA
tctccatcacctctgggctt

SEQ ID NO: 1193 - DNA, 20 bp, synthetic construct
  source 1..20: mol_type = other DNA
agccattcactcattctgag

SEQ ID NO: 1194 - DNA, 20 bp, synthetic construct
  source 1..20: mol_type = other DNA
gctccaatgcctgggcctgt

SEQ ID NO: 1195 - DNA, 20 bp, synthetic construct
  source 1..20: mol_type = other DNA
ttccataatttaacactctt

SEQ ID NO: 1196 - DNA, 20 bp, synthetic construct
  source 1..20: mol_type = other DNA
gcagtgcacacaggaggcag

SEQ ID NO: 1197 - DNA, 20 bp, synthetic construct
  source 1..20: mol_type = other DNA
tccgcttgtcaattggcttg

SEQ ID NO: 1198 - DNA, 20 bp, synthetic construct
  source 1..20: mol_type = other DNA
gcacacttctgtatccactg

SEQ ID NO: 1199 - DNA, 20 bp, synthetic construct
  source 1..20: mol_type = other DNA
ctccaatgtatatttccatg

SEQ ID NO: 1200 - DNA, 20 bp, synthetic construct
  source 1..20: mol_type = other DNA
cctactcatagccagtgctc

SEQ ID NO: 1201 - DNA, 20 bp, synthetic construct
  source 1..20: mol_type = other DNA
gtccatcacatttagaatgc

SEQ ID NO: 1202 - DNA, 20 bp, synthetic construct
  source 1..20: mol_type = other DNA
aggagcctcgatgtcccatc

SEQ ID NO: 1203 - DNA, 20 bp, synthetic construct
  source 1..20: mol_type = other DNA
ctgctctgaacacttcgcag

SEQ ID NO: 1204 - DNA, 20 bp, synthetic construct
  source 1..20: mol_type = other DNA
gctaactccaaacatccttc

SEQ ID NO: 1205 - DNA, 20 bp, synthetic construct
  source 1..20: mol_type = other DNA
cgccttgcccggccgggccc

SEQ ID NO: 1206 - DNA, 20 bp, synthetic construct
  source 1..20: mol_type = other DNA
tcatggttagtcttgttaat

SEQ ID NO: 1207 - DNA, 20 bp, synthetic construct
  source 1..20: mol_type = other DNA
gcttgcatcacctcatgatt

SEQ ID NO: 1208 - DNA, 20 bp, synthetic construct
  source 1..20: mol_type = other DNA
gcttctgtgcaatcctgcat

SEQ ID NO: 1209 - DNA, 20 bp, synthetic construct
  source 1..20: mol_type = other DNA
tgtcaccttggtcttgtcga

SEQ ID NO: 1210 - DNA, 20 bp, synthetic construct
  source 1..20: mol_type = other DNA
tcctagcattctcttcactt

SEQ ID NO: 1211 - DNA, 20 bp, synthetic construct
  source 1..20: mol_type = other DNA
ctgctttataccagcttttt

SEQ ID NO: 1212 - DNA, 20 bp, synthetic construct
  source 1..20: mol_type = other DNA
aactgtctgtctccccagct

SEQ ID NO: 1213 - DNA, 20 bp, synthetic construct
  source 1..20: mol_type = other DNA
cgcagtcccccatggcggcg

SEQ ID NO: 1214 - DNA, 20 bp, synthetic construct
  source 1..20: mol_type = other DNA
agtctcatgtagtcaatggc

SEQ ID NO: 1215 - DNA, 20 bp, synthetic construct
  source 1..20: mol_type = other DNA
aaggagctgctctcccagga

SEQ ID NO: 1216 - DNA, 20 bp, synthetic construct
  source 1..20: mol_type = other DNA
gctgcatcctaatggcatat

SEQ ID NO: 1217 - DNA, 20 bp, synthetic construct
  source 1..20: mol_type = other DNA
gcccttgtagatccgcttgt

SEQ ID NO: 1218 - DNA, 20 bp, synthetic construct
  source 1..20: mol_type = other DNA
tctccatgtatgattctaca

SEQ ID NO: 1219 - DNA, 20 bp, synthetic construct
  source 1..20: mol_type = other DNA
tgaccaggtcatcttcgcca

SEQ ID NO: 1220 - DNA, 20 bp, synthetic construct
  source 1..20: mol_type = other DNA
ttgtgtgactcgcaggtccg

SEQ ID NO: 1221 - DNA, 20 bp, synthetic construct
  source 1..20: mol_type = other DNA
cttcagatatgtcaccttgg

SEQ ID NO: 1222 - DNA, 20 bp, synthetic construct
  source 1..20: mol_type = other DNA
tcagaatgtccttcttggct

SEQ ID NO: 1223 - DNA, 20 bp, synthetic construct
  source 1..20: mol_type = other DNA
gccgtcgcccgggagtagct

SEQ ID NO: 1224 - DNA, 20 bp, synthetic construct
  source 1..20: mol_type = other DNA
gctcctccacaggcttccaa

SEQ ID NO: 1225 - DNA, 20 bp, synthetic construct
  source 1..20: mol_type = other DNA
tccgactcaggcagccactt

SEQ ID NO: 1226 - DNA, 20 bp, synthetic construct
  source 1..20: mol_type = other DNA
ggtcttgtcgatcaaccgct

SEQ ID NO: 1227 - DNA, 20 bp, synthetic construct
  source 1..20: mol_type = other DNA
atggcatatagtgggtaggt

SEQ ID NO: 1228 - DNA, 20 bp, synthetic construct
  source 1..20: mol_type = other DNA
gccacttcagatatgtcacc

SEQ ID NO: 1229 - DNA, 20 bp, synthetic construct
  source 1..20: mol_type = other DNA
gatccgcttgtcaattggct

SEQ ID NO: 1230 - DNA, 20 bp, synthetic construct
  source 1..20: mol_type = other DNA
tgggcttgcatcacctcatg

SEQ ID NO: 1231 - DNA, 20 bp, synthetic construct
  source 1..20: mol_type = other DNA
ccgacttatttactagcctc

SEQ ID NO: 1232 - DNA, 20 bp, synthetic construct
  source 1..20: mol_type = other DNA
ccctcttttcctcatccaat

SEQ ID NO: 1233 - DNA, 20 bp, synthetic construct
  source 1..20: mol_type = other DNA
acagctcctactcatagcca

SEQ ID NO: 1234 - DNA, 20 bp, synthetic construct
  source 1..20: mol_type = other DNA
tgttccgttcactcccttca

SEQ ID NO: 1235 - DNA, 20 bp, synthetic construct
  source 1..20: mol_type = other DNA
tcgatgtcccatctttggcg

SEQ ID NO: 1236 - DNA, 20 bp, synthetic construct
  source 1..20: mol_type = other DNA
cgtttactggtatctcctcg

SEQ ID NO: 1237 - DNA, 20 bp, synthetic construct
  source 1..20: mol_type = other DNA
cgatctttgtttggttcact

SEQ ID NO: 1238 - DNA, 20 bp, synthetic construct
  source 1..20: mol_type = other DNA
cctagagtgtcccaagggca

SEQ ID NO: 1239 - DNA, 20 bp, synthetic construct
  source 1..20: mol_type = other DNA
ggttctcaccacatcgcttt

SEQ ID NO: 1240 - DNA, 20 bp, synthetic construct
  source 1..20: mol_type = other DNA
aggtcatcttcgccacccgt

SEQ ID NO: 1241 - DNA, 20 bp, synthetic construct
  source 1..20: mol_type = other DNA
gccacacggcttctgtgcaa

SEQ ID NO: 1242 - DNA, 20 bp, synthetic construct
  source 1..20: mol_type = other DNA
cgccgctccgctccccatca

SEQ ID NO: 1243 - DNA, 20 bp, synthetic construct
  source 1..20: mol_type = other DNA
acagaattgtcctgtatctc

SEQ ID NO: 1244 - DNA, 20 bp, synthetic construct
  source 1..20: mol_type = other DNA
gcctgtctgtcctctgcagc

SEQ ID NO: 1245 - DNA, 20 bp, synthetic construct
  source 1..20: mol_type = other DNA
cccgagccgccctccgcgcc

SEQ ID NO: 1246 - DNA, 20 bp, synthetic construct
  source 1..20: mol_type = other DNA
tgtcctttttgatgagatcc

SEQ ID NO: 1247 - DNA, 20 bp, synthetic construct
  source 1..20: mol_type = other DNA
atccttcatattttccacca

SEQ ID NO: 1248 - DNA, 20 bp, synthetic construct
  source 1..20: mol_type = other DNA
aagaatttgcattcttttac

SEQ ID NO: 1249 - DNA, 20 bp, synthetic construct
  source 1..20: mol_type = other DNA
agaatttgcattcttttaca

SEQ ID NO: 1250 - DNA, 20 bp, synthetic construct
  source 1..20: mol_type = other DNA
aatttgcattcttttacaac

SEQ ID NO: 1251 - DNA, 20 bp, synthetic construct
  source 1..20: mol_type = other DNA
atttgcattcttttacaact

SEQ ID NO: 1252 - DNA, 20 bp, synthetic construct
  source 1..20: mol_type = other DNA
tgcattcttttacaactgat

SEQ ID NO: 1253 - DNA, 20 bp, synthetic construct
  source 1..20: mol_type = other DNA
cattcttttacaactgattg

SEQ ID NO: 1254 - DNA, 20 bp, synthetic construct
  source 1..20: mol_type = other DNA
attcttttacaactgattgt

SEQ ID NO: 1255 - DNA, 20 bp, synthetic construct
  source 1..20: mol_type = other DNA
catggcttgtttctccttca

SEQ ID NO: 1256 - DNA, 20 bp, synthetic construct
  source 1..20: mol_type = other DNA
atggcttgtttctccttcac

SEQ ID NO: 1257 - DNA, 20 bp, synthetic construct
  source 1..20: mol_type = other DNA
tggcttgtttctccttcacc

SEQ ID NO: 1258 - DNA, 20 bp, synthetic construct
  source 1..20: mol_type = other DNA
cttgtttctccttcaccagc

SEQ ID NO: 1259 - DNA, 20 bp, synthetic construct
  source 1..20: mol_type = other DNA
ttgtttctccttcaccagcg

SEQ ID NO: 1260 - DNA, 20 bp, synthetic construct
  source 1..20: mol_type = other DNA
tgctttagtcctacccctta

SEQ ID NO: 1261 - DNA, 20 bp, synthetic construct
  source 1..20: mol_type = other DNA
ttcccgaatgtccgacagtg

SEQ ID NO: 1262 - DNA, 20 bp, synthetic construct
  source 1..20: mol_type = other DNA
tcccgaatgtccgacagtgt

SEQ ID NO: 1263 - DNA, 20 bp, synthetic construct
  source 1..20: mol_type = other DNA
ttgttatatggctgattcaa

SEQ ID NO: 1264 - DNA, 20 bp, synthetic construct
  source 1..20: mol_type = other DNA
tgttatatggctgattcaaa

SEQ ID NO: 1265 - DNA, 18 bp, synthetic construct
  source 1..18: mol_type = other DNA
atggcttgtttctccttc

SEQ ID NO: 1266 - DNA, 18 bp, synthetic construct
  source 1..18: mol_type = other DNA
atttgcattcttttacaa

SEQ ID NO: 1267 - DNA, 18 bp, synthetic construct
  source 1..18: mol_type = other DNA
tttgcattcttttacaac

SEQ ID NO: 1268 - DNA, 18 bp, synthetic construct
  source 1..18: mol_type = other DNA
ttgcattcttttacaact

SEQ ID NO: 1269 - DNA, 18 bp, synthetic construct
  source 1..18: mol_type = other DNA
tgcattcttttacaactg

SEQ ID NO: 1270 - DNA, 18 bp, synthetic construct
  source 1..18: mol_type = other DNA
gcattcttttacaactga

SEQ ID NO: 1271 - DNA, 18 bp, synthetic construct
  source 1..18: mol_type = other DNA
cattcttttacaactgat

SEQ ID NO: 1272 - DNA, 18 bp, synthetic construct
  source 1..18: mol_type = other DNA
attcttttacaactgatt

SEQ ID NO: 1273 - DNA, 18 bp, synthetic construct
  source 1..18: mol_type = other DNA
ttcttttacaactgattg

SEQ ID NO: 1274 - DNA, 18 bp, synthetic construct
  source 1..18: mol_type = other DNA
cttgtttctccttcacca

SEQ ID NO: 1275 - DNA, 18 bp, synthetic construct
  source 1..18: mol_type = other DNA
ttgtttctccttcaccag

SEQ ID NO: 1276 - DNA, 18 bp, synthetic construct
  source 1..18: mol_type = other DNA
tgtttctccttcaccagc

SEQ ID NO: 1277 - DNA, 18 bp, synthetic construct
  source 1..18: mol_type = other DNA
gtttctccttcaccagcg

SEQ ID NO: 1278 - DNA, 20 bp, synthetic construct
  source 1..20: mol_type = other DNA
gtaatgttgtccagtaataa

SEQ ID NO: 1279 - DNA, 20 bp, synthetic construct
  source 1..20: mol_type = other DNA
gtatgtgtaatgttgtccag

SEQ ID NO: 1280 - DNA, 20 bp, synthetic construct
  source 1..20: mol_type = other DNA
cggagcggttgtgaactggc

SEQ ID NO: 1281 - DNA, 20 bp, synthetic construct
  source 1..20: mol_type = other DNA
ctcggagcggttgtgaactg

SEQ ID NO: 1282 - DNA, 20 bp, synthetic construct
  source 1..20: mol_type = other DNA
ctcagtagtagatgggcaca

SEQ ID NO: 1283 - DNA, 20 bp, synthetic construct
  source 1..20: mol_type = other DNA
gcttgtttctccttcaccag

SEQ ID NO: 1284 - DNA, 20 bp, synthetic construct
  source 1..20: mol_type = other DNA
gaatttgcattcttttacaa

SEQ ID NO: 1285 - DNA, 20 bp, synthetic construct
  source 1..20: mol_type = other DNA
ttcttttacaactgattgta

SEQ ID NO: 1286 - DNA, 20 bp, synthetic construct
  source 1..20: mol_type = other DNA
ctcaacatttctggaatccc

SEQ ID NO: 1287 - DNA, 20 bp, synthetic construct
  source 1..20: mol_type = other DNA
acccccatgttctagggtca

SEQ ID NO: 1288 - DNA, 20 bp, synthetic construct
  source 1..20: mol_type = other DNA
acatctttataagagtcccc

SEQ ID NO: 1289 - DNA, 20 bp, synthetic construct
  source 1..20: mol_type = other DNA
gcctattttttaatttcagt

SEQ ID NO: 1290 - DNA, 20 bp, synthetic construct
  source 1..20: mol_type = other DNA
gccccatcattttttcttgt

SEQ ID NO: 1291 - DNA, 20 bp, synthetic construct
  source 1..20: mol_type = other DNA
cacaccacctcttttcccct

SEQ ID NO: 1292 - DNA, 20 bp, synthetic construct
  source 1..20: mol_type = other DNA
cctattttttaatttcagtt

SEQ ID NO: 1293 - DNA, 20 bp, synthetic construct
  source 1..20: mol_type = other DNA
ctcagatagggaaggcccct

SEQ ID NO: 1294 - DNA, 20 bp, synthetic construct
  source 1..20: mol_type = other DNA
cttacatgttccccccaaac

SEQ ID NO: 1295 - DNA, 20 bp, synthetic construct
  source 1..20: mol_type = other DNA
ctgcccaaggcctttgccct

SEQ ID NO: 1296 - DNA, 20 bp, synthetic construct
  source 1..20: mol_type = other DNA
cacacagtttgttacacaca

SEQ ID NO: 1297 - DNA, 20 bp, synthetic construct
  source 1..20: mol_type = other DNA
cttgtttatcccctactcct

SEQ ID NO: 1298 - DNA, 20 bp, synthetic construct
  source 1..20: mol_type = other DNA
gcactcttccctgcgccccg

SEQ ID NO: 1299 - DNA, 20 bp, synthetic construct
  source 1..20: mol_type = other DNA
ctcacctgtggctccctctg

SEQ ID NO: 1300 - DNA, 20 bp, synthetic construct
  source 1..20: mol_type = other DNA
atccttgtttatcccctact

SEQ ID NO: 1301 - DNA, 20 bp, synthetic construct
  source 1..20: mol_type = other DNA
ccttccatggcttgtttctc

SEQ ID NO: 1302 - DNA, 20 bp, synthetic construct
  source 1..20: mol_type = other DNA
gccctcaccttttctctccc

SEQ ID NO: 1303 - DNA, 20 bp, synthetic construct
  source 1..20: mol_type = other DNA
ctcaccttttctctcccaat

SEQ ID NO: 1304 - DNA, 20 bp, synthetic construct
  source 1..20: mol_type = other DNA
acttccttttccttatctgt

SEQ ID NO: 1305 - DNA, 20 bp, synthetic construct
  source 1..20: mol_type = other DNA
cttccttttccttatctgta

SEQ ID NO: 1306 - DNA, 20 bp, synthetic construct
  source 1..20: mol_type = other DNA
ttccttatctgtattttcta

SEQ ID NO: 1307 - DNA, 20 bp, synthetic construct
  source 1..20: mol_type = other DNA
tctccatcttctgacctcaa

SEQ ID NO: 1308 - DNA, 20 bp, synthetic construct
  source 1..20: mol_type = other DNA
ctcagctgttgtagtcccaa

SEQ ID NO: 1309 - DNA, 20 bp, synthetic construct
  source 1..20: mol_type = other DNA
gcccagttctgttttttttt

SEQ ID NO: 1310 - DNA, 20 bp, synthetic construct
  source 1..20: mol_type = other DNA
atcattttttcttgtatcct

SEQ ID NO: 1311 - DNA, 20 bp, synthetic construct
  source 1..20: mol_type = other DNA
actccattgtctcagccctg

SEQ ID NO: 1312 - DNA, 20 bp, synthetic construct
  source 1..20: mol_type = other DNA
cttgccataggtctccgccg

SEQ ID NO: 1313 - DNA, 20 bp, synthetic construct
  source 1..20: mol_type = other DNA
accacctcttttcccctcca

SEQ ID NO: 1314 - DNA, 20 bp, synthetic construct
  source 1..20: mol_type = other DNA
ccacctcttttcccctccaa

SEQ ID NO: 1315 - DNA, 20 bp, synthetic construct
  source 1..20: mol_type = other DNA
acctcttttcccctccaaat

SEQ ID NO: 1316 - DNA, 20 bp, synthetic construct
  source 1..20: mol_type = other DNA
gctcttgtccctcttcctag

SEQ ID NO: 1317 - DNA, 20 bp, synthetic construct
  source 1..20: mol_type = other DNA
gtccctcttcctagtcaccc

SEQ ID NO: 1318 - DNA, 20 bp, synthetic construct
  source 1..20: mol_type = other DNA
tccctcttcctagtcacccc

SEQ ID NO: 1319 - DNA, 20 bp, synthetic construct
  source 1..20: mol_type = other DNA
tccacccgcttctgcaccca

SEQ ID NO: 1320 - DNA, 20 bp, synthetic construct
  source 1..20: mol_type = other DNA
ccctctgtctgtctcccctt

SEQ ID NO: 1321 - DNA, 20 bp, synthetic construct
  source 1..20: mol_type = other DNA
ctccccttctctctgcctct

SEQ ID NO: 1322 - DNA, 20 bp, synthetic construct
  source 1..20: mol_type = other DNA
ccttctctctgcctctcagc

SEQ ID NO: 1323 - DNA, 20 bp, synthetic construct
  source 1..20: mol_type = other DNA
ctgcctctcagcttcaccct

SEQ ID NO: 1324 - DNA, 20 bp, synthetic construct
  source 1..20: mol_type = other DNA
ctggcccttcttggcctcca

SEQ ID NO: 1325 - DNA, 20 bp, synthetic construct
  source 1..20: mol_type = other DNA
gcccttcttggcctccacct

SEQ ID NO: 1326 - DNA, 20 bp, synthetic construct
  source 1..20: mol_type = other DNA
ccttccagccctggccccag

SEQ ID NO: 1327 - DNA, 20 bp, synthetic construct
  source 1..20: mol_type = other DNA
cctgccatcctgccccccca

SEQ ID NO: 1328 - DNA, 20 bp, synthetic construct
  source 1..20: mol_type = other DNA
ctgccatcctgcccccccaa

SEQ ID NO: 1329 - DNA, 20 bp, synthetic construct
  source 1..20: mol_type = other DNA
ctgccgtgggcccagccccg

SEQ ID NO: 1330 - DNA, 18 bp, synthetic construct
  source 1..18: mol_type = other DNA
ggcttgtttctccttcac

SEQ ID NO: 1331 - DNA, 18 bp, synthetic construct
  source 1..18: mol_type = other DNA
tggcttgtttctccttca

SEQ ID NO: 1332 - DNA, 16 bp, synthetic construct
  source 1..16: mol_type = other DNA
gttatatggctgattc

SEQ ID NO: 1333 - DNA, 16 bp, synthetic construct
  source 1..16: mol_type = other DNA
atgtgtaatgttgtcc

SEQ ID NO: 1334 - DNA, 16 bp, synthetic construct
  source 1..16: mol_type = other DNA
  modified_base 5: mod_base = OTHER; note = uracil
accttcccgaatgtcc

SEQ ID NO: 1335 - DNA, 16 bp, synthetic construct
  source 1..16: mol_type = other DNA
cttttattcgcgaggg

SEQ ID NO: 1336 - DNA, 16 bp, synthetic construct
  source 1..16: mol_type = other DNA
acaataaataccgagg

SEQ ID NO: 1337 - DNA, 16 bp, synthetic construct
  source 1..16: mol_type = other DNA
tcccgaatgtccgaca

SEQ ID NO: 1338 - DNA, 16 bp, synthetic construct
  source 1..16: mol_type = other DNA
tggaatctatcatggc

SEQ ID NO: 1339 - DNA, 16 bp, synthetic construct
  source 1..16: mol_type = other DNA
ttgtgataagcaatgc

SEQ ID NO: 1340 - DNA, 16 bp, synthetic construct
  source 1..16: mol_type = other DNA
acttgtgataagcaat

SEQ ID NO: 1341 - DNA, 16 bp, synthetic construct
  source 1..16: mol_type = other DNA
ttacttgtgataagca

SEQ ID NO: 1342 - DNA, 16 bp, synthetic construct
  source 1..16: mol_type = other DNA
tgtaatgttgtccagt

SEQ ID NO: 1343 - DNA, 16 bp, synthetic construct
  source 1..16: mol_type = other DNA
ggtttctgtctgcttc

SEQ ID NO: 1344 - DNA, 16 bp, synthetic construct
  source 1..16: mol_type = other DNA
cgtggtttctgtctgc

SEQ ID NO: 1345 - DNA, 16 bp, synthetic construct
  source 1..16: mol_type = other DNA
gctgaatgaagtctcg

SEQ ID NO: 1346 - DNA, 16 bp, synthetic construct
  source 1..16: mol_type = other DNA
ggcttctgtgccgtgc

SEQ ID NO: 1347 - DNA, 16 bp, synthetic construct
  source 1..16: mol_type = other DNA
ctagattcagatgcag

SEQ ID NO: 1348 - DNA, 16 bp, synthetic construct
  source 1..16: mol_type = other DNA
cgtgtaaggttctggg

SEQ ID NO: 1349 - DNA, 16 bp, synthetic construct
  source 1..16: mol_type = other DNA
gtcgagatagtgagac

SEQ ID NO: 1350 - DNA, 16 bp, synthetic construct
  source 1..16: mol_type = other DNA
gcggaagcatcctcct

SEQ ID NO: 1351 - DNA, 16 bp, synthetic construct
  source 1..16: mol_type = other DNA
aacaagtgtcacacac

SEQ ID NO: 1352 - DNA, 16 bp, synthetic construct
  source 1..16: mol_type = other DNA
ataaccatagagatct

SEQ ID NO: 1353 - DNA, 16 bp, synthetic construct
  source 1..16: mol_type = other DNA
aactttatggagggag

SEQ ID NO: 1354 - DNA, 16 bp, synthetic construct
  source 1..16: mol_type = other DNA
tagtagatgggcacag

SEQ ID NO: 1355 - DNA, 16 bp, synthetic construct
  source 1..16: mol_type = other DNA
ggccttactgtctgaa

SEQ ID NO: 1356 - DNA, 16 bp, synthetic construct
  source 1..16: mol_type = other DNA
gcttacatgttccccc

SEQ ID NO: 1357 - DNA, 16 bp, synthetic construct
  source 1..16: mol_type = other DNA
gcctggcacgattttt

SEQ ID NO: 1358 - DNA, 16 bp, synthetic construct
  source 1..16: mol_type = other DNA
gtgtaatgttgtccag

SEQ ID NO: 1359 - DNA, 16 bp, synthetic construct
  source 1..16: mol_type = other DNA
cattaatgataaggta

SEQ ID NO: 1360 - DNA, 16 bp, synthetic construct
  source 1..16: mol_type = other DNA
gggaacacggctcagg

SEQ ID NO: 1361 - DNA, 16 bp, synthetic construct
  source 1..16: mol_type = other DNA
ttctagggtcagctca

SEQ ID NO: 1362 - DNA, 16 bp, synthetic construct
  source 1..16: mol_type = other DNA
aaagatcgacttctca

SEQ ID NO: 1363 - DNA, 16 bp, synthetic construct
  source 1..16: mol_type = other DNA
caggaatgattcagcc

SEQ ID NO: 1364 - DNA, 16 bp, synthetic construct
  source 1..16: mol_type = other DNA
ctaaatctacacaggg

SEQ ID NO: 1365 - DNA, 16 bp, synthetic construct
  source 1..16: mol_type = other DNA
ccctatatctggacgg

SEQ ID NO: 1366 - DNA, 16 bp, synthetic construct
  source 1..16: mol_type = other DNA
tcgaatcccgtccgaa

SEQ ID NO: 1367 - DNA, 16 bp, synthetic construct
  source 1..16: mol_type = other DNA
tctctctgcggccggc

SEQ ID NO: 1368 - DNA, 16 bp, synthetic construct
  source 1..16: mol_type = other DNA
agtctatggccatgac

SEQ ID NO: 1369 - DNA, 16 bp, synthetic construct
  source 1..16: mol_type = other DNA
tgcactttgcgaacca

SEQ ID NO: 1370 - DNA, 16 bp, synthetic construct
  source 1..16: mol_type = other DNA
atgttaaactgggcag

SEQ ID NO: 1371 - DNA, 16 bp, synthetic construct
  source 1..16: mol_type = other DNA
ggagtgctttagtcct

SEQ ID NO: 1372 - DNA, 16 bp, synthetic construct
  source 1..16: mol_type = other DNA
gatcttcttgcacaca

SEQ ID NO: 1373 - DNA, 16 bp, synthetic construct
  source 1..16: mol_type = other DNA
ccacgaaaggtcctgc

SEQ ID NO: 1374 - DNA, 16 bp, synthetic construct
  source 1..16: mol_type = other DNA
cactctaaggatctga

SEQ ID NO: 1375 - DNA, 16 bp, synthetic construct
  source 1..16: mol_type = other DNA
tcagatcctgagtccc

SEQ ID NO: 1376 - DNA, 16 bp, synthetic construct
  source 1..16: mol_type = other DNA
acaagatgccaggcct

SEQ ID NO: 1377 - DNA, 16 bp, synthetic construct
  source 1..16: mol_type = other DNA
ggactctacgattcca

SEQ ID NO: 1378 - DNA, 16 bp, synthetic construct
  source 1..16: mol_type = other DNA
tacctctaccactgac

SEQ ID NO: 1379 - DNA, 16 bp, synthetic construct
  source 1..16: mol_type = other DNA
catcttagctagcttc

SEQ ID NO: 1380 - DNA, 16 bp, synthetic construct
  source 1..16: mol_type = other DNA
cgatatccatggcttc

SEQ ID NO: 1381 - DNA, 16 bp, synthetic construct
  source 1..16: mol_type = other DNA
ccatcatggttagtct

SEQ ID NO: 1382 - DNA, 16 bp, synthetic construct
  source 1..16: mol_type = other DNA
ttacatcgcccgtgtc

SEQ ID NO: 1383 - DNA, 16 bp, synthetic construct
  source 1..16: mol_type = other DNA
accagtcacatgctgg

SEQ ID NO: 1384 - DNA, 16 bp, synthetic construct
  source 1..16: mol_type = other DNA
tacatcatctcctccg

SEQ ID NO: 1385 - DNA, 16 bp, synthetic construct
  source 1..16: mol_type = other DNA
ggcaggatgctcttct

SEQ ID NO: 1386 - DNA, 16 bp, synthetic construct
  source 1..16: mol_type = other DNA
gctttataccagcttt

SEQ ID NO: 1387 - DNA, 16 bp, synthetic construct
  source 1..16: mol_type = other DNA
gggaatgcatggagaa

SEQ ID NO: 1388 - DNA, 16 bp, synthetic construct
  source 1..16: mol_type = other DNA
gctgttggcagcctag

SEQ ID NO: 1389 - DNA, 16 bp, synthetic construct
  source 1..16: mol_type = other DNA
tgcagctcgggccaca

SEQ ID NO: 1390 - DNA, 16 bp, synthetic construct
  source 1..16: mol_type = other DNA
tcaatttctaaggccc

SEQ ID NO: 1391 - DNA, 16 bp, synthetic construct
  source 1..16: mol_type = other DNA
gactttcccacagacg

SEQ ID NO: 1392 - DNA, 16 bp, synthetic construct
  source 1..16: mol_type = other DNA
catctttataagagtc

SEQ ID NO: 1393 - DNA, 16 bp, synthetic construct
  source 1..16: mol_type = other DNA
ccaaccaagaaggtcc

SEQ ID NO: 1394 - DNA, 16 bp, synthetic construct
  source 1..16: mol_type = other DNA
gtttgatgtccctgca

SEQ ID NO: 1395 - DNA, 16 bp, synthetic construct
  source 1..16: mol_type = other DNA
ggtctaatactccgcc

SEQ ID NO: 1396 - DNA, 16 bp, synthetic construct
  source 1..16: mol_type = other DNA
ccagtattgttcagca

SEQ ID NO: 1397 - DNA, 16 bp, synthetic construct
  source 1..16: mol_type = other DNA
tcttgtatcctgttgc

SEQ ID NO: 1398 - DNA, 16 bp, synthetic construct
  source 1..16: mol_type = other DNA
ggtcctccaactctgg

SEQ ID NO: 1399 - DNA, 16 bp, synthetic construct
  source 1..16: mol_type = other DNA
tggttacaagattctg

SEQ ID NO: 1400 - DNA, 16 bp, synthetic construct
  source 1..16: mol_type = other DNA
tatatggctgattcaa

SEQ ID NO: 1401 - DNA, 16 bp, synthetic construct
  source 1..16: mol_type = other DNA
atctggtgagctcacg

SEQ ID NO: 1402 - DNA, 16 bp, synthetic construct
  source 1..16: mol_type = other DNA
tactgtttcatcctgt

SEQ ID NO: 1403 - DNA, 16 bp, synthetic construct
  source 1..16: mol_type = other DNA
cgtctctccgtggttt

SEQ ID NO: 1404 - DNA, 16 bp, synthetic construct
  source 1..16: mol_type = other DNA
tgtttatcccctactc

SEQ ID NO: 1405 - DNA, 16 bp, synthetic construct
  source 1..16: mol_type = other DNA
gggactcacctgtggc

SEQ ID NO: 1406 - DNA, 16 bp, synthetic construct
  source 1..16: mol_type = other DNA
tcgcatcccgctagct

SEQ ID NO: 1407 - DNA, 16 bp, synthetic construct
  source 1..16: mol_type = other DNA
ggaattcccggctccg

SEQ ID NO: 1408 - DNA, 16 bp, synthetic construct
  source 1..16: mol_type = other DNA
tgtgtgtccgtccccc

SEQ ID NO: 1409 - DNA, 16 bp, synthetic construct
  source 1..16: mol_type = other DNA
gcaactttgggaagtt

SEQ ID NO: 1410 - DNA, 16 bp, synthetic construct
  source 1..16: mol_type = other DNA
cctcatggtagcgcgc

SEQ ID NO: 1411 - DNA, 16 bp, synthetic construct
  source 1..16: mol_type = other DNA
tgtctcctcgccgtcc

SEQ ID NO: 1412 - DNA, 16 bp, synthetic construct
  source 1..16: mol_type = other DNA
gagattgtgagctggt

SEQ ID NO: 1413 - DNA, 16 bp, synthetic construct
  source 1..16: mol_type = other DNA
gtgggtaagagtaacg

SEQ ID NO: 1414 - DNA, 16 bp, synthetic construct
  source 1..16: mol_type = other DNA
gcaaatttcccgagta

SEQ ID NO: 1415 - DNA, 16 bp, synthetic construct
  source 1..16: mol_type = other DNA
aggttccaagactgat

SEQ ID NO: 1416 - DNA, 16 bp, synthetic construct
  source 1..16: mol_type = other DNA
aggtcctccaactctg

SEQ ID NO: 1417 - DNA, 16 bp, synthetic construct
  source 1..16: mol_type = other DNA
tcttagacaaagtagc

SEQ ID NO: 1418 - DNA, 16 bp, synthetic construct
  source 1..16: mol_type = other DNA
ccgtggtttctgtctg

SEQ ID NO: 1419 - DNA, 16 bp, synthetic construct
  source 1..16: mol_type = other DNA
aggaacaaatcaggat

SEQ ID NO: 1420 - DNA, 16 bp, synthetic construct
  source 1..16: mol_type = other DNA
gagtctatggccatga

SEQ ID NO: 1421 - DNA, 16 bp, synthetic construct
  source 1..16: mol_type = other DNA
cgctgaatgaagtctc

SEQ ID NO: 1422 - DNA, 16 bp, synthetic construct
  source 1..16: mol_type = other DNA
tctagattcagatgca

SEQ ID NO: 1423 - DNA, 16 bp, synthetic construct
  source 1..16: mol_type = other DNA
acataaacaccgtgta

SEQ ID NO: 1424 - DNA, 16 bp, synthetic construct
  source 1..16: mol_type = other DNA
acatatgagggccaga

SEQ ID NO: 1425 - DNA, 16 bp, synthetic construct
  source 1..16: mol_type = other DNA
gaaacaagtgtcacac

SEQ ID NO: 1426 - DNA, 16 bp, synthetic construct
  source 1..16: mol_type = other DNA
cgagatgcagctcggg

SEQ ID NO: 1427 - DNA, 16 bp, synthetic construct
  source 1..16: mol_type = other DNA
catcaatttctaaggc

SEQ ID NO: 1428 - DNA, 16 bp, synthetic construct
  source 1..16: mol_type = other DNA
tcttaccgcacacaga

SEQ ID NO: 1429 - DNA, 16 bp, synthetic construct
  source 1..16: mol_type = other DNA
acctatcccattccag

SEQ ID NO: 1430 - DNA, 16 bp, synthetic construct
  source 1..16: mol_type = other DNA
gagataaccatagaga

SEQ ID NO: 1431 - DNA, 16 bp, synthetic construct
  source 1..16: mol_type = other DNA
caactttatggaggga

SEQ ID NO: 1432 - DNA, 16 bp, synthetic construct
  source 1..16: mol_type = other DNA
aatttaaggtcctcca

SEQ ID NO: 1433 - DNA, 16 bp, synthetic construct
  source 1..16: mol_type = other DNA
tcattaatgataaggt

SEQ ID NO: 1434 - DNA, 16 bp, synthetic construct
  source 1..16: mol_type = other DNA
gtatgaagtggctgtc

SEQ ID NO: 1435 - DNA, 16 bp, synthetic construct
  source 1..16: mol_type = other DNA
caaagatcgacttctc

SEQ ID NO: 1436 - DNA, 16 bp, synthetic construct
  source 1..16: mol_type = other DNA
tcaggaatgattcagc

SEQ ID NO: 1437 - DNA, 16 bp, synthetic construct
  source 1..16: mol_type = other DNA
tctaaatctacacagg

SEQ ID NO: 1438 - DNA, 16 bp, synthetic construct
  source 1..16: mol_type = other DNA
cgtccctctgcagtcg

SEQ ID NO: 1439 - DNA, 16 bp, synthetic construct
  source 1..16: mol_type = other DNA
gttgtgaactggcagg

SEQ ID NO: 1440 - DNA, 16 bp, synthetic construct
  source 1..16: mol_type = other DNA
agctttgcactttgcg

SEQ ID NO: 1441 - DNA, 16 bp, synthetic construct
  source 1..16: mol_type = other DNA
gaatgttaaactgggc

SEQ ID NO: 1442 - DNA, 16 bp, synthetic construct
  source 1..16: mol_type = other DNA
aggagtgctttagtcc

SEQ ID NO: 1443 - DNA, 16 bp, synthetic construct
  source 1..16: mol_type = other DNA
gaatggtgtgccaggc

SEQ ID NO: 1444 - DNA, 16 bp, synthetic construct
  source 1..16: mol_type = other DNA
gcgatcttcttgcaca

SEQ ID NO: 1445 - DNA, 16 bp, synthetic construct
  source 1..16: mol_type = other DNA
tcttcccacgaaaggt

SEQ ID NO: 1446 - DNA, 16 bp, synthetic construct
  source 1..16: mol_type = other DNA
tcctagctggctctca

SEQ ID NO: 1447 - DNA, 16 bp, synthetic construct
  source 1..16: mol_type = other DNA
gggattcccagcctgt

SEQ ID NO: 1448 - DNA, 16 bp, synthetic construct
  source 1..16: mol_type = other DNA
aacttacaagatgcca

SEQ ID NO: 1449 - DNA, 16 bp, synthetic construct
  source 1..16: mol_type = other DNA
gggactcaggactcta

SEQ ID NO: 1450 - DNA, 16 bp, synthetic construct
  source 1..16: mol_type = other DNA
tcccttctaacttggg

SEQ ID NO: 1451 - DNA, 16 bp, synthetic construct
  source 1..16: mol_type = other DNA
tgcatcttagctagct

SEQ ID NO: 1452 - DNA, 16 bp, synthetic construct
  source 1..16: mol_type = other DNA
ccgatatccatggctt

SEQ ID NO: 1453 - DNA, 16 bp, synthetic construct
  source 1..16: mol_type = other DNA
tccatcatggttagtc

SEQ ID NO: 1454 - DNA, 16 bp, synthetic construct
  source 1..16: mol_type = other DNA
attacatcgcccgtgt

SEQ ID NO: 1455 - DNA, 16 bp, synthetic construct
  source 1..16: mol_type = other DNA
gtgaccagtcacatgc

SEQ ID NO: 1456 - DNA, 16 bp, synthetic construct
  source 1..16: mol_type = other DNA
gtcctctacatcatct

SEQ ID NO: 1457 - DNA, 16 bp, synthetic construct
  source 1..16: mol_type = other DNA
gaccgaggagtcccag

SEQ ID NO: 1458 - DNA, 16 bp, synthetic construct
  source 1..16: mol_type = other DNA
tgctttataccagctt

SEQ ID NO: 1459 - DNA, 16 bp, synthetic construct
  source 1..16: mol_type = other DNA
gtaggcactcacccca

SEQ ID NO: 1460 - DNA, 16 bp, synthetic construct
  source 1..16: mol_type = other DNA
ggctgttggcagccta

SEQ ID NO: 1461 - DNA, 16 bp, synthetic construct
  source 1..16: mol_type = other DNA
gcttctacagttctga

SEQ ID NO: 1462 - DNA, 16 bp, synthetic construct
  source 1..16: mol_type = other DNA
cactggctcaccgttc

SEQ ID NO: 1463 - DNA, 16 bp, synthetic construct
  source 1..16: mol_type = other DNA
tggtctaatactccgc

SEQ ID NO: 1464 - DNA, 16 bp, synthetic construct
  source 1..16: mol_type = other DNA
gtagtagatgggcaca

SEQ ID NO: 1465 - DNA, 16 bp, synthetic construct
  source 1..16: mol_type = other DNA
gccctgatcactctgg

SEQ ID NO: 1466 - DNA, 16 bp, synthetic construct
  source 1..16: mol_type = other DNA
cccagtattgttcagc

SEQ ID NO: 1467 - DNA, 16 bp, synthetic construct
  source 1..16: mol_type = other DNA
ttcttgtatcctgttg

SEQ ID NO: 1468 - DNA, 16 bp, synthetic construct
  source 1..16: mol_type = other DNA
tggcttacatgttccc

SEQ ID NO: 1469 - DNA, 16 bp, synthetic construct
  source 1..16: mol_type = other DNA
atggttacaagattct

SEQ ID NO: 1470 - DNA, 16 bp, synthetic construct
  source 1..16: mol_type = other DNA
aatctatcatggctca

SEQ ID NO: 1471 - DNA, 16 bp, synthetic construct
  source 1..16: mol_type = other DNA
ccatctggtgagctca

SEQ ID NO: 1472 - DNA, 16 bp, synthetic construct
  source 1..16: mol_type = other DNA
tgtgtaatgttgtcca

SEQ ID NO: 1473 - DNA, 16 bp, synthetic construct
  source 1..16: mol_type = other DNA
gttctagggtcagctc

SEQ ID NO: 1474 - DNA, 16 bp, synthetic construct
  source 1..16: mol_type = other DNA
cttactgtttcatcct

SEQ ID NO: 1475 - DNA, 16 bp, synthetic construct
  source 1..16: mol_type = other DNA
gtctgaagtaacctcg

SEQ ID NO: 1476 - DNA, 16 bp, synthetic construct
  source 1..16: mol_type = other DNA
aatccttgtttatccc

SEQ ID NO: 1477 - DNA, 16 bp, synthetic construct
  source 1..16: mol_type = other DNA
cacatgagggactcac

SEQ ID NO: 1478 - DNA, 16 bp, synthetic construct
  source 1..16: mol_type = other DNA
ggcttctgccctctaa

SEQ ID NO: 1479 - DNA, 16 bp, synthetic construct
  source 1..16: mol_type = other DNA
gttagtccactcgcac

SEQ ID NO: 1480 - DNA, 16 bp, synthetic construct
  source 1..16: mol_type = other DNA
tgattcggccgcttcg

SEQ ID NO: 1481 - DNA, 16 bp, synthetic construct
  source 1..16: mol_type = other DNA
cggaattcccggctcc

SEQ ID NO: 1482 - DNA, 16 bp, synthetic construct
  source 1..16: mol_type = other DNA
ttgtgtgtgtccgtcc

SEQ ID NO: 1483 - DNA, 16 bp, synthetic construct
  source 1..16: mol_type = other DNA
agccatgttttgcaac

SEQ ID NO: 1484 - DNA, 16 bp, synthetic construct
  source 1..16: mol_type = other DNA
atacttgtccactgcg

SEQ ID NO: 1485 - DNA, 16 bp, synthetic construct
  source 1..16: mol_type = other DNA
gactgtctcctcgccg

SEQ ID NO: 1486 - DNA, 16 bp, synthetic construct
  source 1..16: mol_type = other DNA
tgagattgtgagctgg

SEQ ID NO: 1487 - DNA, 16 bp, synthetic construct
  source 1..16: mol_type = other DNA
cgtttcacaacaaagg

SEQ ID NO: 1488 - DNA, 16 bp, synthetic construct
  source 1..16: mol_type = other DNA
  modified_base 5: mod_base = OTHER; note = uracil
tatgtgtaatgttgtc

SEQ ID NO: 1489 - DNA, 16 bp, synthetic construct
  source 1..16: mol_type = other DNA
tggctgattcaaagaa

SEQ ID NO: 1490 - DNA, 16 bp, synthetic construct
  source 1..16: mol_type = other DNA
ttcgcgagggtcgggg

SEQ ID NO: 1491 - DNA, 16 bp, synthetic construct
  source 1..16: mol_type = other DNA
ggcttacatgttcccc

SEQ ID NO: 1492 - DNA, 16 bp, synthetic construct
  source 1..16: mol_type = other DNA
gtgataagcaatgcat

SEQ ID NO: 1493 - DNA, 16 bp, synthetic construct
  source 1..16: mol_type = other DNA
agacaaagtagcatga

SEQ ID NO: 1494 - DNA, 16 bp, synthetic construct
  source 1..16: mol_type = other DNA
ttagacaaagtagcat

SEQ ID NO: 1495 - DNA, 16 bp, synthetic construct
  source 1..16: mol_type = other DNA
ttcactaccgctacct

SEQ ID NO: 1496 - DNA, 16 bp, synthetic construct
  source 1..16: mol_type = other DNA
acatatcccagactca

SEQ ID NO: 1497 - DNA, 16 bp, synthetic construct
  source 1..16: mol_type = other DNA
tgggtaacggcccaga

SEQ ID NO: 1498 - DNA, 16 bp, synthetic construct
  source 1..16: mol_type = other DNA
cacataaacaccgtgt

SEQ ID NO: 1499 - DNA, 16 bp, synthetic construct
  source 1..16: mol_type = other DNA
ggccatagagcccact

SEQ ID NO: 1500 - DNA, 16 bp, synthetic construct
  source 1..16: mol_type = other DNA
gacatatgagggccag

SEQ ID NO: 1501 - DNA, 16 bp, synthetic construct
  source 1..16: mol_type = other DNA
aggaaacaagtgtcac

SEQ ID NO: 1502 - DNA, 16 bp, synthetic construct
  source 1..16: mol_type = other DNA
gcgagatgcagctcgg

SEQ ID NO: 1503 - DNA, 16 bp, synthetic construct
  source 1..16: mol_type = other DNA
ggctcggtcattcatc

SEQ ID NO: 1504 - DNA, 16 bp, synthetic construct
  source 1..16: mol_type = other DNA
cctcttaccgcacaca

SEQ ID NO: 1505 - DNA, 16 bp, synthetic construct
  source 1..16: mol_type = other DNA
ggcagtggccccgtta

SEQ ID NO: 1506 - DNA, 16 bp, synthetic construct
  source 1..16: mol_type = other DNA
agagataaccatagag

SEQ ID NO: 1507 - DNA, 16 bp, synthetic construct
  source 1..16: mol_type = other DNA
ggcttctacagttctg

SEQ ID NO: 1508 - DNA, 16 bp, synthetic construct
  source 1..16: mol_type = other DNA
agtatacaggcatgcg

SEQ ID NO: 1509 - DNA, 16 bp, synthetic construct
  source 1..16: mol_type = other DNA
tgaaaatttaaggtcc

SEQ ID NO: 1510 - DNA, 16 bp, synthetic construct
  source 1..16: mol_type = other DNA
ttcattaatgataagg

SEQ ID NO: 1511 - DNA, 16 bp, synthetic construct
  source 1..16: mol_type = other DNA
accaacttactgtttc

SEQ ID NO: 1512 - DNA, 16 bp, synthetic construct
  source 1..16: mol_type = other DNA
gtaactacagagaccg

SEQ ID NO: 1513 - DNA, 16 bp, synthetic construct
  source 1..16: mol_type = other DNA
tcaaagatcgacttct

SEQ ID NO: 1514 - DNA, 16 bp, synthetic construct
  source 1..16: mol_type = other DNA
ccctaatgccctcacg

SEQ ID NO: 1515 - DNA, 16 bp, synthetic construct
  source 1..16: mol_type = other DNA
acacatgagggactca

SEQ ID NO: 1516 - DNA, 16 bp, synthetic construct
  source 1..16: mol_type = other DNA
gctgaataaagggctt

SEQ ID NO: 1517 - DNA, 16 bp, synthetic construct
  source 1..16: mol_type = other DNA
cggtgcaccgagtcta

SEQ ID NO: 1518 - DNA, 16 bp, synthetic construct
  source 1..16: mol_type = other DNA
agcggttgtgaactgg

SEQ ID NO: 1519 - DNA, 16 bp, synthetic construct
  source 1..16: mol_type = other DNA
aagctttgcactttgc

SEQ ID NO: 1520 - DNA, 16 bp, synthetic construct
  source 1..16: mol_type = other DNA
ggaatgttaaactggg

SEQ ID NO: 1521 - DNA, 16 bp, synthetic construct
  source 1..16: mol_type = other DNA
tgaatggtgtgccagg

SEQ ID NO: 1522 - DNA, 16 bp, synthetic construct
  source 1..16: mol_type = other DNA
ggcgatcttcttgcac

SEQ ID NO: 1523 - DNA, 16 bp, synthetic construct
  source 1..16: mol_type = other DNA
gacagcaacaaagccc

SEQ ID NO: 1524 - DNA, 16 bp, synthetic construct
  source 1..16: mol_type = other DNA
ccaattcctagctggc

SEQ ID NO: 1525 - DNA, 16 bp, synthetic construct
  source 1..16: mol_type = other DNA
gatgagttggaggtca

SEQ ID NO: 1526 - DNA, 16 bp, synthetic construct
  source 1..16: mol_type = other DNA
gaacttacaagatgcc

SEQ ID NO: 1527 - DNA, 16 bp, synthetic construct
  source 1..16: mol_type = other DNA
gttctagggactcagg

SEQ ID NO: 1528 - DNA, 16 bp, synthetic construct
  source 1..16: mol_type = other DNA
gaaactggagctccct

SEQ ID NO: 1529 - DNA, 16 bp, synthetic construct
  source 1..16: mol_type = other DNA
ttgcatcttagctagc

SEQ ID NO: 1530 - DNA, 16 bp, synthetic construct
  source 1..16: mol_type = other DNA
cccgatatccatggct

SEQ ID NO: 1531 - DNA, 16 bp, synthetic construct
  source 1..16: mol_type = other DNA
atccatcatggttagt

SEQ ID NO: 1532 - DNA, 16 bp, synthetic construct
  source 1..16: mol_type = other DNA
ctattacatcgcccgt

SEQ ID NO: 1533 - DNA, 16 bp, synthetic construct
  source 1..16: mol_type = other DNA
ggagtgaccagtcaca

SEQ ID NO: 1534 - DNA, 16 bp, synthetic construct
  source 1..16: mol_type = other DNA
gtacacacacaggtcc

SEQ ID NO: 1535 - DNA, 16 bp, synthetic construct
  source 1..16: mol_type = other DNA
tgagaaactaggaggc

SEQ ID NO: 1536 - DNA, 16 bp, synthetic construct
  source 1..16: mol_type = other DNA
cttgctcccgacaagc

SEQ ID NO: 1537 - DNA, 16 bp, synthetic construct
  source 1..16: mol_type = other DNA
ggtaggcactcacccc

SEQ ID NO: 1538 - DNA, 16 bp, synthetic construct
  source 1..16: mol_type = other DNA
ggcactggctcaccgt

SEQ ID NO: 1539 - DNA, 16 bp, synthetic construct
  source 1..16: mol_type = other DNA
aatgcttagcccctcc

SEQ ID NO: 1540 - DNA, 16 bp, synthetic construct
  source 1..16: mol_type = other DNA
ccaactttatggaggg

SEQ ID NO: 1541 - DNA, 16 bp, synthetic construct
  source 1..16: mol_type = other DNA
agtagtagatgggcac

SEQ ID NO: 1542 - DNA, 16 bp, synthetic construct
  source 1..16: mol_type = other DNA
tgcactccattgtctc

SEQ ID NO: 1543 - DNA, 16 bp, synthetic construct
  source 1..16: mol_type = other DNA
atctggtccgtgctgg

SEQ ID NO: 1544 - DNA, 16 bp, synthetic construct
  source 1..16: mol_type = other DNA
gctttttgatcttggc

SEQ ID NO: 1545 - DNA, 16 bp, synthetic construct
  source 1..16: mol_type = other DNA
aatggttacaagattc

SEQ ID NO: 1546 - DNA, 16 bp, synthetic construct
  source 1..16: mol_type = other DNA
ggaatctatcatggct

SEQ ID NO: 1547 - DNA, 16 bp, synthetic construct
  source 1..16: mol_type = other DNA
gccatctggtgagctc

SEQ ID NO: 1548 - DNA, 16 bp, synthetic construct
  source 1..16: mol_type = other DNA
ggtatgaagtggctgt

SEQ ID NO: 1549 - DNA, 16 bp, synthetic construct
  source 1..16: mol_type = other DNA
atgttctagggtcagc

SEQ ID NO: 1550 - DNA, 16 bp, synthetic construct
  source 1..16: mol_type = other DNA
tcctctaaatctacac

SEQ ID NO: 1551 - DNA, 16 bp, synthetic construct
  source 1..16: mol_type = other DNA
aggaatccttgtttat

SEQ ID NO: 1552 - DNA, 16 bp, synthetic construct
  source 1..16: mol_type = other DNA
agctgttgttagtcca

SEQ ID NO: 1553 - DNA, 16 bp, synthetic construct
  source 1..16: mol_type = other DNA
ggtgcctccgggtggc

SEQ ID NO: 1554 - DNA, 16 bp, synthetic construct
  source 1..16: mol_type = other DNA
cacattccccatctcg

SEQ ID NO: 1555 - DNA, 16 bp, synthetic construct
  source 1..16: mol_type = other DNA
tccactcgggtctctg

SEQ ID NO: 1556 - DNA, 16 bp, synthetic construct
  source 1..16: mol_type = other DNA
gtagccatgttttgca

SEQ ID NO: 1557 - DNA, 16 bp, synthetic construct
  source 1..16: mol_type = other DNA
gatacttgtccactgc

SEQ ID NO: 1558 - DNA, 16 bp, synthetic construct
  source 1..16: mol_type = other DNA
gtagactgtctcctcg

SEQ ID NO: 1559 - DNA, 16 bp, synthetic construct
  source 1..16: mol_type = other DNA
ccacacttagtccccg

SEQ ID NO: 1560 - DNA, 16 bp, synthetic construct
  source 1..16: mol_type = other DNA
gggaaaccggagctgg

SEQ ID NO: 1561 - DNA, 16 bp, synthetic construct
  source 1..16: mol_type = other DNA
cggaagcacgacacct

SEQ ID NO: 1562 - DNA, 16 bp, synthetic construct
  source 1..16: mol_type = other DNA
tgtcactgggcagatt

SEQ ID NO: 1563 - DNA, 16 bp, synthetic construct
  source 1..16: mol_type = other DNA
actttgcgaaccaacg

SEQ ID NO: 1564 - DNA, 16 bp, synthetic construct
  source 1..16: mol_type = other DNA
gaatctatcatggctc

SEQ ID NO: 1565 - DNA, 16 bp, synthetic construct
  source 1..16: mol_type = other DNA
acggagggagatctgg

SEQ ID NO: 1566 - DNA, 16 bp, synthetic construct
  source 1..16: mol_type = other DNA
atctagggagatcccg

SEQ ID NO: 1567 - DNA, 16 bp, synthetic construct
  source 1..16: mol_type = other DNA
atcttcactaccgcta

SEQ ID NO: 1568 - DNA, 16 bp, synthetic construct
  source 1..16: mol_type = other DNA
tcatgcacaagaaagc

SEQ ID NO: 1569 - DNA, 16 bp, synthetic construct
  source 1..16: mol_type = other DNA
aggaatgttaaactgg

SEQ ID NO: 1570 - DNA, 16 bp, synthetic construct
  source 1..16: mol_type = other DNA
ccacataaacaccgtg

SEQ ID NO: 1571 - DNA, 16 bp, synthetic construct
  source 1..16: mol_type = other DNA
ctggatcgcagaggag

SEQ ID NO: 1572 - DNA, 16 bp, synthetic construct
  source 1..16: mol_type = other DNA
agacatatgagggcca

SEQ ID NO: 1573 - DNA, 16 bp, synthetic construct
  source 1..16: mol_type = other DNA
acaggaaacaagtgtc

SEQ ID NO: 1574 - DNA, 16 bp, synthetic construct
  source 1..16: mol_type = other DNA
cgcgagatgcagctcg

SEQ ID NO: 1575 - DNA, 16 bp, synthetic construct
  source 1..16: mol_type = other DNA
gttctaaggctcggtc

SEQ ID NO: 1576 - DNA, 16 bp, synthetic construct
  source 1..16: mol_type = other DNA
agaataggtcccagac

SEQ ID NO: 1577 - DNA, 16 bp, synthetic construct
  source 1..16: mol_type = other DNA
ccaaatgcttagcccc

SEQ ID NO: 1578 - DNA, 16 bp, synthetic construct
  source 1..16: mol_type = other DNA
ccttactccaacttta

SEQ ID NO: 1579 - DNA, 16 bp, synthetic construct
  source 1..16: mol_type = other DNA
ctcatctggtccgtgc

SEQ ID NO: 1580 - DNA, 16 bp, synthetic construct
  source 1..16: mol_type = other DNA
ctgaaaatttaaggtc

SEQ ID NO: 1581 - DNA, 16 bp, synthetic construct
  source 1..16: mol_type = other DNA
gttaatggttacaaga

SEQ ID NO: 1582 - DNA, 16 bp, synthetic construct
  source 1..16: mol_type = other DNA
tgccatctggtgagct

SEQ ID NO: 1583 - DNA, 16 bp, synthetic construct
  source 1..16: mol_type = other DNA
gttcattaatgataag

SEQ ID NO: 1584 - DNA, 16 bp, synthetic construct
  source 1..16: mol_type = other DNA
gggtatgaagtggctg

SEQ ID NO: 1585 - DNA, 16 bp, synthetic construct
  source 1..16: mol_type = other DNA
ctcaaagatcgacttc

SEQ ID NO: 1586 - DNA, 16 bp, synthetic construct
  source 1..16: mol_type = other DNA
ctaggaatccttgttt

SEQ ID NO: 1587 - DNA, 16 bp, synthetic construct
  source 1..16: mol_type = other DNA
tctatacacgccccgc

SEQ ID NO: 1588 - DNA, 16 bp, synthetic construct
  source 1..16: mol_type = other DNA
ggctgaataaagggct

SEQ ID NO: 1589 - DNA, 16 bp, synthetic construct
  source 1..16: mol_type = other DNA
cgaatacacccagcgc

SEQ ID NO: 1590 - DNA, 16 bp, synthetic construct
  source 1..16: mol_type = other DNA
gaatgtccgacagtgt

SEQ ID NO: 1591 - DNA, 16 bp, synthetic construct
  source 1..16: mol_type = other DNA
cggatcacaggactgg

SEQ ID NO: 1592 - DNA, 16 bp, synthetic construct
  source 1..16: mol_type = other DNA
cacatatcccagactc

SEQ ID NO: 1593 - DNA, 16 bp, synthetic construct
  source 1..16: mol_type = other DNA
cagttcaggtgcagcc

SEQ ID NO: 1594 - DNA, 16 bp, synthetic construct
  source 1..16: mol_type = other DNA
ctgaatggtgtgccag

SEQ ID NO: 1595 - DNA, 16 bp, synthetic construct
  source 1..16: mol_type = other DNA
ggaacaggaggactgt

SEQ ID NO: 1596 - DNA, 16 bp, synthetic construct
  source 1..16: mol_type = other DNA
taagatttccctggct

SEQ ID NO: 1597 - DNA, 16 bp, synthetic construct
  source 1..16: mol_type = other DNA
agccttggatgcccca

SEQ ID NO: 1598 - DNA, 16 bp, synthetic construct
  source 1..16: mol_type = other DNA
gtgatgagttggaggt

SEQ ID NO: 1599 - DNA, 16 bp, synthetic construct
  source 1..16: mol_type = other DNA
cgaacttacaagatgc

SEQ ID NO: 1600 - DNA, 16 bp, synthetic construct
  source 1..16: mol_type = other DNA
agttctagggactcag

SEQ ID NO: 1601 - DNA, 16 bp, synthetic construct
  source 1..16: mol_type = other DNA
ggaaactggagctccc

SEQ ID NO: 1602 - DNA, 16 bp, synthetic construct
  source 1..16: mol_type = other DNA
ggaacttgcatcttag

SEQ ID NO: 1603 - DNA, 16 bp, synthetic construct
  source 1..16: mol_type = other DNA
gttatggctaggaggc

SEQ ID NO: 1604 - DNA, 16 bp, synthetic construct
  source 1..16: mol_type = other DNA
ccatccatcatggtta

SEQ ID NO: 1605 - DNA, 16 bp, synthetic construct
  source 1..16: mol_type = other DNA
gctattacatcgcccg

SEQ ID NO: 1606 - DNA, 16 bp, synthetic construct
  source 1..16: mol_type = other DNA
ggctcttgtggcaggg

SEQ ID NO: 1607 - DNA, 16 bp, synthetic construct
  source 1..16: mol_type = other DNA
agtacacacacaggtc

SEQ ID NO: 1608 - DNA, 16 bp, synthetic construct
  source 1..16: mol_type = other DNA
ggtggacggttctcca

SEQ ID NO: 1609 - DNA, 16 bp, synthetic construct
  source 1..16: mol_type = other DNA
ccaattgaggctgagt

SEQ ID NO: 1610 - DNA, 16 bp, synthetic construct
  source 1..16: mol_type = other DNA
agggtaggcactcacc

SEQ ID NO: 1611 - DNA, 16 bp, synthetic construct
  source 1..16: mol_type = other DNA
ccctcttaccgcacac

SEQ ID NO: 1612 - DNA, 16 bp, synthetic construct
  source 1..16: mol_type = other DNA
cagagataaccataga

SEQ ID NO: 1613 - DNA, 16 bp, synthetic construct
  source 1..16: mol_type = other DNA
cacttcctcgggttcc

SEQ ID NO: 1614 - DNA, 16 bp, synthetic construct
  source 1..16: mol_type = other DNA
cgctcccacactctgt

SEQ ID NO: 1615 - DNA, 16 bp, synthetic construct
  source 1..16: mol_type = other DNA
tcagtagtagatgggc

SEQ ID NO: 1616 - DNA, 16 bp, synthetic construct
  source 1..16: mol_type = other DNA
atagctccccactcca

SEQ ID NO: 1617 - DNA, 16 bp, synthetic construct
  source 1..16: mol_type = other DNA
tctcatgacccaccgg

SEQ ID NO: 1618 - DNA, 16 bp, synthetic construct
  source 1..16: mol_type = other DNA
gtctcctgcgcaagac

SEQ ID NO: 1619 - DNA, 16 bp, synthetic construct
  source 1..16: mol_type = other DNA
cttattgttatatggc

SEQ ID NO: 1620 - DNA, 16 bp, synthetic construct
  source 1..16: mol_type = other DNA
acttttgttgagacca

SEQ ID NO: 1621 - DNA, 16 bp, synthetic construct
  source 1..16: mol_type = other DNA
gtatgtgtaatgttgt

SEQ ID NO: 1622 - DNA, 16 bp, synthetic construct
  source 1..16: mol_type = other DNA
catgttctagggtcag

SEQ ID NO: 1623 - DNA, 16 bp, synthetic construct
  source 1..16: mol_type = other DNA
tccaccaacttactgt

SEQ ID NO: 1624 - DNA, 16 bp, synthetic construct
  source 1..16: mol_type = other DNA
cactgtaactacagag

SEQ ID NO: 1625 - DNA, 16 bp, synthetic construct
  source 1..16: mol_type = other DNA
ctccctaatgccctca

SEQ ID NO: 1626 - DNA, 16 bp, synthetic construct
  source 1..16: mol_type = other DNA
gtcctctaaatctaca

SEQ ID NO: 1627 - DNA, 16 bp, synthetic construct
  source 1..16: mol_type = other DNA
cagctgttgttagtcc

SEQ ID NO: 1628 - DNA, 16 bp, synthetic construct
  source 1..16: mol_type = other DNA
ttttctcgagcttgcg

SEQ ID NO: 1629 - DNA, 16 bp, synthetic construct
  source 1..16: mol_type = other DNA
cacgcctccgtctcca

SEQ ID NO: 1630 - DNA, 16 bp, synthetic construct
  source 1..16: mol_type = other DNA
ctccactcgggtctct

SEQ ID NO: 1631 - DNA, 16 bp, synthetic construct
  source 1..16: mol_type = other DNA
ggtagccatgttttgc

SEQ ID NO: 1632 - DNA, 16 bp, synthetic construct
  source 1..16: mol_type = other DNA
tcgatacttgtccact

SEQ ID NO: 1633 - DNA, 16 bp, synthetic construct
  source 1..16: mol_type = other DNA
cagtagactgtctcct

SEQ ID NO: 1634 - DNA, 16 bp, synthetic construct
  source 1..16: mol_type = other DNA
gcctgtcccgtccaca

SEQ ID NO: 1635 - DNA, 16 bp, synthetic construct
  source 1..16: mol_type = other DNA
ggttacagggaaaccg

SEQ ID NO: 1636 - DNA, 16 bp, synthetic construct
  source 1..16: mol_type = other DNA
cgacacctcgcccctc

SEQ ID NO: 1637 - DNA, 16 bp, synthetic construct
  source 1..16: mol_type = other DNA
ttgttatatggctgat

SEQ ID NO: 1638 - DNA, 16 bp, synthetic construct
  source 1..16: mol_type = other DNA
attgttatatggctga

SEQ ID NO: 1639 - DNA, 16 bp, synthetic construct
  source 1..16: mol_type = other DNA
atggctgattcaaaga

SEQ ID NO: 1640 - DNA, 16 bp, synthetic construct
  source 1..16: mol_type = other DNA
tgtaactacagagacc

SEQ ID NO: 1641 - DNA, 16 bp, synthetic construct
  source 1..16: mol_type = other DNA
ggttatctagggagat

SEQ ID NO: 1642 - DNA, 16 bp, synthetic construct
  source 1..16: mol_type = other DNA
gcgaatacacccagcg

SEQ ID NO: 1643 - DNA, 16 bp, synthetic construct
  source 1..16: mol_type = other DNA
ccgaatgtccgacagt

SEQ ID NO: 1644 - DNA, 16 bp, synthetic construct
  source 1..16: mol_type = other DNA
agagatcgcgccagac

SEQ ID NO: 1645 - DNA, 16 bp, synthetic construct
  source 1..16: mol_type = other DNA
ggcctctcagaagtca

SEQ ID NO: 1646 - DNA, 16 bp, synthetic construct
  source 1..16: mol_type = other DNA
cgagggtaggcactca

SEQ ID NO: 1647 - DNA, 16 bp, synthetic construct
  source 1..16: mol_type = other DNA
tcctggatcgcagagg

SEQ ID NO: 1648 - DNA, 16 bp, synthetic construct
  source 1..16: mol_type = other DNA
ccagacatatgagggc

SEQ ID NO: 1649 - DNA, 16 bp, synthetic construct
  source 1..16: mol_type = other DNA
ggctgaatggcctggc

SEQ ID NO: 1650 - DNA, 16 bp, synthetic construct
  source 1..16: mol_type = other DNA
cccttttaaggcagca

SEQ ID NO: 1651 - DNA, 16 bp, synthetic construct
  source 1..16: mol_type = other DNA
agagaataggtcccag

SEQ ID NO: 1652 - DNA, 16 bp, synthetic construct
  source 1..16: mol_type = other DNA
tcagatagctccccac

SEQ ID NO: 1653 - DNA, 16 bp, synthetic construct
  source 1..16: mol_type = other DNA
tccgacagtgtctcct

SEQ ID NO: 1654 - DNA, 16 bp, synthetic construct
  source 1..16: mol_type = other DNA
gtacatagatctgaaa

SEQ ID NO: 1655 - DNA, 16 bp, synthetic construct
  source 1..16: mol_type = other DNA
agttaatggttacaag

SEQ ID NO: 1656 - DNA, 16 bp, synthetic construct
  source 1..16: mol_type = other DNA
ccttattgttatatgg

SEQ ID NO: 1657 - DNA, 16 bp, synthetic construct
  source 1..16: mol_type = other DNA
agtatgtgtaatgttg

SEQ ID NO: 1658 - DNA, 16 bp, synthetic construct
  source 1..16: mol_type = other DNA
aacttgaggtcagcac

SEQ ID NO: 1659 - DNA, 16 bp, synthetic construct
  source 1..16: mol_type = other DNA
gtctatacacgccccg

SEQ ID NO: 1660 - DNA, 16 bp, synthetic construct
  source 1..16: mol_type = other DNA
ttcatcttcactaccg

SEQ ID NO: 1661 - DNA, 16 bp, synthetic construct
  source 1..16: mol_type = other DNA
ggcgggcccggatcac

SEQ ID NO: 1662 - DNA, 16 bp, synthetic construct
  source 1..16: mol_type = other DNA
gtcacatatcccagac

SEQ ID NO: 1663 - DNA, 16 bp, synthetic construct
  source 1..16: mol_type = other DNA
gtaacggagtctgcag

SEQ ID NO: 1664 - DNA, 16 bp, synthetic construct
  source 1..16: mol_type = other DNA
tgtctccccgcccccg

SEQ ID NO: 1665 - DNA, 16 bp, synthetic construct
  source 1..16: mol_type = other DNA
gctgaatggtgtgcca

SEQ ID NO: 1666 - DNA, 16 bp, synthetic construct
  source 1..16: mol_type = other DNA
gatgatgcagtcctcc

SEQ ID NO: 1667 - DNA, 16 bp, synthetic construct
  source 1..16: mol_type = other DNA
ctaagatttccctggc

SEQ ID NO: 1668 - DNA, 16 bp, synthetic construct
  source 1..16: mol_type = other DNA
tcgagtgacaggcagt

SEQ ID NO: 1669 - DNA, 16 bp, synthetic construct
  source 1..16: mol_type = other DNA
ggtgatgagttggagg

SEQ ID NO: 1670 - DNA, 16 bp, synthetic construct
  source 1..16: mol_type = other DNA
cccaagacgagctccg

SEQ ID NO: 1671 - DNA, 16 bp, synthetic construct
  source 1..16: mol_type = other DNA
aagttctagggactca

SEQ ID NO: 1672 - DNA, 16 bp, synthetic construct
  source 1..16: mol_type = other DNA
gcggatcctgagtgag

SEQ ID NO: 1673 - DNA, 16 bp, synthetic construct
  source 1..16: mol_type = other DNA
gggaacttgcatctta

SEQ ID NO: 1674 - DNA, 16 bp, synthetic construct
  source 1..16: mol_type = other DNA
ggttatggctaggagg

SEQ ID NO: 1675 - DNA, 16 bp, synthetic construct
  source 1..16: mol_type = other DNA
gtccatccatcatggt

SEQ ID NO: 1676 - DNA, 16 bp, synthetic construct
  source 1..16: mol_type = other DNA
ggctattacatcgccc

SEQ ID NO: 1677 - DNA, 16 bp, synthetic construct
  source 1..16: mol_type = other DNA
aatagcaagggcagct

SEQ ID NO: 1678 - DNA, 16 bp, synthetic construct
  source 1..16: mol_type = other DNA
gagtacacacacaggt

SEQ ID NO: 1679 - DNA, 16 bp, synthetic construct
  source 1..16: mol_type = other DNA
gggtggacggttctcc

SEQ ID NO: 1680 - DNA, 16 bp, synthetic construct
  source 1..16: mol_type = other DNA
gccaattgaggctgag

SEQ ID NO: 1681 - DNA, 16 bp, synthetic construct
  source 1..16: mol_type = other DNA
ggttctaaggctcggt

SEQ ID NO: 1682 - DNA, 16 bp, synthetic construct
  source 1..16: mol_type = other DNA
tcatccacctgacaca

SEQ ID NO: 1683 - DNA, 16 bp, synthetic construct
  source 1..16: mol_type = other DNA
tccatcacggatggct

SEQ ID NO: 1684 - DNA, 16 bp, synthetic construct
  source 1..16: mol_type = other DNA
tccagtcccgctccca

SEQ ID NO: 1685 - DNA, 16 bp, synthetic construct
  source 1..16: mol_type = other DNA
tgcggccgtgctcacc

SEQ ID NO: 1686 - DNA, 16 bp, synthetic construct
  source 1..16: mol_type = other DNA
tgtccttactccaact

SEQ ID NO: 1687 - DNA, 16 bp, synthetic construct
  source 1..16: mol_type = other DNA
ggtcctcagtagtaga

SEQ ID NO: 1688 - DNA, 16 bp, synthetic construct
  source 1..16: mol_type = other DNA
gggaccagagctcatc

SEQ ID NO: 1689 - DNA, 16 bp, synthetic construct
  source 1..16: mol_type = other DNA
tcaatcaagcgattct

SEQ ID NO: 1690 - DNA, 16 bp, synthetic construct
  source 1..16: mol_type = other DNA
tacttttgttgagacc

SEQ ID NO: 1691 - DNA, 16 bp, synthetic construct
  source 1..16: mol_type = other DNA
accactgccatctggt

SEQ ID NO: 1692 - DNA, 16 bp, synthetic construct
  source 1..16: mol_type = other DNA
ttcagaatcaagctgg

SEQ ID NO: 1693 - DNA, 16 bp, synthetic construct
  source 1..16: mol_type = other DNA
ccatgttctagggtca

SEQ ID NO: 1694 - DNA, 16 bp, synthetic construct
  source 1..16: mol_type = other DNA
gtccctgacggacccc

SEQ ID NO: 1695 - DNA, 16 bp, synthetic construct
  source 1..16: mol_type = other DNA
cttaatgccccactgt

SEQ ID NO: 1696 - DNA, 16 bp, synthetic construct
  source 1..16: mol_type = other DNA
ccacttggcacctttc

SEQ ID NO: 1697 - DNA, 16 bp, synthetic construct
  source 1..16: mol_type = other DNA
acctatgtccctctgc

SEQ ID NO: 1698 - DNA, 16 bp, synthetic construct
  source 1..16: mol_type = other DNA
tgagtctggtcctcta

SEQ ID NO: 1699 - DNA, 16 bp, synthetic construct
  source 1..16: mol_type = other DNA
tggttccaggctagga

SEQ ID NO: 1700 - DNA, 16 bp, synthetic construct
  source 1..16: mol_type = other DNA
ggaatctggtgaggcc

SEQ ID NO: 1701 - DNA, 16 bp, synthetic construct
  source 1..16: mol_type = other DNA
acagctgttgttagtc

SEQ ID NO: 1702 - DNA, 16 bp, synthetic construct
  source 1..16: mol_type = other DNA
acttttctcgagcttg

SEQ ID NO: 1703 - DNA, 16 bp, synthetic construct
  source 1..16: mol_type = other DNA
cttctgcacgcctccg

SEQ ID NO: 1704 - DNA, 16 bp, synthetic construct
  source 1..16: mol_type = other DNA
cgagatccagctctcc

SEQ ID NO: 1705 - DNA, 16 bp, synthetic construct
  source 1..16: mol_type = other DNA
caaggtagccatgttt

SEQ ID NO: 1706 - DNA, 16 bp, synthetic construct
  source 1..16: mol_type = other DNA
gtcgatacttgtccac

SEQ ID NO: 1707 - DNA, 16 bp, synthetic construct
  source 1..16: mol_type = other DNA
agcagtagactgtctc

SEQ ID NO: 1708 - DNA, 16 bp, synthetic construct
  source 1..16: mol_type = other DNA
ggtgcctgtcccgtcc

SEQ ID NO: 1709 - DNA, 16 bp, synthetic construct
  source 1..16: mol_type = other DNA
tatggctgattcaaag

SEQ ID NO: 1710 - DNA, 16 bp, synthetic construct
  source 1..16: mol_type = other DNA
cggcggcacgagacag

SEQ ID NO: 1711 - DNA, 16 bp, synthetic construct
  source 1..16: mol_type = other DNA
tttattcgcgagggtc

SEQ ID NO: 1712 - DNA, 16 bp, synthetic construct
  source 1..16: mol_type = other DNA
taatgttgtccagtaa

SEQ ID NO: 1713 - DNA, 16 bp, synthetic construct
  source 1..16: mol_type = other DNA
ggcctcttaggagtct

SEQ ID NO: 1714 - DNA, 16 bp, synthetic construct
  source 1..16: mol_type = other DNA
gacaaaaggccttgct

SEQ ID NO: 1715 - DNA, 16 bp, synthetic construct
  source 1..16: mol_type = other DNA
ggcatacacctggccc

SEQ ID NO: 1716 - DNA, 16 bp, synthetic construct
  source 1..16: mol_type = other DNA
ggcgaatacacccagc

SEQ ID NO: 1717 - DNA, 16 bp, synthetic construct
  source 1..16: mol_type = other DNA
tacaaggacccttcga

SEQ ID NO: 1718 - DNA, 16 bp, synthetic construct
  source 1..16: mol_type = other DNA
ggtcacatatcccaga

SEQ ID NO: 1719 - DNA, 16 bp, synthetic construct
  source 1..16: mol_type = other DNA
ggtaacggagtctgca

SEQ ID NO: 1720 - DNA, 16 bp, synthetic construct
  source 1..16: mol_type = other DNA
tccgacagtgtctccc

SEQ ID NO: 1721 - DNA, 16 bp, synthetic construct
  source 1..16: mol_type = other DNA
accaaacaccagtcac

SEQ ID NO: 1722 - DNA, 16 bp, synthetic construct
  source 1..16: mol_type = other DNA
tactaaagggaggcca

SEQ ID NO: 1723 - DNA, 16 bp, synthetic construct
  source 1..16: mol_type = other DNA
ccagagaataggtccc

SEQ ID NO: 1724 - DNA, 16 bp, synthetic construct
  source 1..16: mol_type = other DNA
ccaaatccagtcccgc

SEQ ID NO: 1725 - DNA, 16 bp, synthetic construct
  source 1..16: mol_type = other DNA
ggcgatagcctgggag

SEQ ID NO: 1726 - DNA, 16 bp, synthetic construct
  source 1..16: mol_type = other DNA
gctcagatagctcccc

SEQ ID NO: 1727 - DNA, 16 bp, synthetic construct
  source 1..16: mol_type = other DNA
ttcaatcaagcgattc

SEQ ID NO: 1728 - DNA, 16 bp, synthetic construct
  source 1..16: mol_type = other DNA
tgcttacctgagggcc

SEQ ID NO: 1729 - DNA, 16 bp, synthetic construct
  source 1..16: mol_type = other DNA
aagtacatagatctga

SEQ ID NO: 1730 - DNA, 16 bp, synthetic construct
  source 1..16: mol_type = other DNA
cgtaaaagttaatggt

SEQ ID NO: 1731 - DNA, 16 bp, synthetic construct
  source 1..16: mol_type = other DNA
ggccttattgttatat

SEQ ID NO: 1732 - DNA, 16 bp, synthetic construct
  source 1..16: mol_type = other DNA
tgtgataagcaatgca

SEQ ID NO: 1733 - DNA, 16 bp, synthetic construct
  source 1..16: mol_type = other DNA
gtatagtatgtgtaat

SEQ ID NO: 1734 - DNA, 16 bp, synthetic construct
  source 1..16: mol_type = other DNA
gttcaatcctgaccca

SEQ ID NO: 1735 - DNA, 16 bp, synthetic construct
  source 1..16: mol_type = other DNA
gcaacttgaggtcagc

SEQ ID NO: 1736 - DNA, 16 bp, synthetic construct
  source 1..16: mol_type = other DNA
cccaattgtccctgac

SEQ ID NO: 1737 - DNA, 16 bp, synthetic construct
  source 1..16: mol_type = other DNA
tacttaatgccccact

SEQ ID NO: 1738 - DNA, 16 bp, synthetic construct
  source 1..16: mol_type = other DNA
caaatcaggattccca

SEQ ID NO: 1739 - DNA, 16 bp, synthetic construct
  source 1..16: mol_type = other DNA
aatgatccaagccccc

SEQ ID NO: 1740 - DNA, 16 bp, synthetic construct
  source 1..16: mol_type = other DNA
tgtctatacacgcccc

SEQ ID NO: 1741 - DNA, 16 bp, synthetic construct
  source 1..16: mol_type = other DNA
tatctagggagatccc

SEQ ID NO: 1742 - DNA, 16 bp, synthetic construct
  source 1..16: mol_type = other DNA
agctgtttcatcctgt

SEQ ID NO: 1743 - DNA, 16 bp, synthetic construct
  source 1..16: mol_type = other DNA
cgagtaagcaggcaga

SEQ ID NO: 1744 - DNA, 16 bp, synthetic construct
  source 1..16: mol_type = other DNA
acaatcaggcctctca

SEQ ID NO: 1745 - DNA, 16 bp, synthetic construct
  source 1..16: mol_type = other DNA
tgctgaatggtgtgcc

SEQ ID NO: 1746 - DNA, 16 bp, synthetic construct
  source 1..16: mol_type = other DNA
tgatgatgcagtcctc

SEQ ID NO: 1747 - DNA, 16 bp, synthetic construct
  source 1..16: mol_type = other DNA
acactaagatttccct

SEQ ID NO: 1748 - DNA, 16 bp, synthetic construct
  source 1..16: mol_type = other DNA
agattctggttcgagt

SEQ ID NO: 1749 - DNA, 16 bp, synthetic construct
  source 1..16: mol_type = other DNA
ctgttctaagaggtga

SEQ ID NO: 1750 - DNA, 16 bp, synthetic construct
  source 1..16: mol_type = other DNA
gcaactgagtccaagc

SEQ ID NO: 1751 - DNA, 16 bp, synthetic construct
  source 1..16: mol_type = other DNA
tcagactgtgctctca

SEQ ID NO: 1752 - DNA, 16 bp, synthetic construct
  source 1..16: mol_type = other DNA
gtccttggcggatcct

SEQ ID NO: 1753 - DNA, 16 bp, synthetic construct
  source 1..16: mol_type = other DNA
tgggaacttgcatctt

SEQ ID NO: 1754 - DNA, 16 bp, synthetic construct
  source 1..16: mol_type = other DNA
agggttatggctagga

SEQ ID NO: 1755 - DNA, 16 bp, synthetic construct
  source 1..16: mol_type = other DNA
agcagtccatccatca

SEQ ID NO: 1756 - DNA, 16 bp, synthetic construct
  source 1..16: mol_type = other DNA
gggctattacatcgcc

SEQ ID NO: 1757 - DNA, 16 bp, synthetic construct
  source 1..16: mol_type = other DNA
acaatagcaagggcag

SEQ ID NO: 1758 - DNA, 16 bp, synthetic construct
  source 1..16: mol_type = other DNA
tagaaccacagagtac

SEQ ID NO: 1759 - DNA, 16 bp, synthetic construct
  source 1..16: mol_type = other DNA
agggtggacggttctc

SEQ ID NO: 1760 - DNA, 16 bp, synthetic construct
  source 1..16: mol_type = other DNA
tgctgaaacagggcca

SEQ ID NO: 1761 - DNA, 16 bp, synthetic construct
  source 1..16: mol_type = other DNA
caggtccacactctga

SEQ ID NO: 1762 - DNA, 16 bp, synthetic construct
  source 1..16: mol_type = other DNA
caaagttgtccctcct

SEQ ID NO: 1763 - DNA, 16 bp, synthetic construct
  source 1..16: mol_type = other DNA
acattgagccctttta

SEQ ID NO: 1764 - DNA, 16 bp, synthetic construct
  source 1..16: mol_type = other DNA
aggttctaaggctcgg

SEQ ID NO: 1765 - DNA, 16 bp, synthetic construct
  source 1..16: mol_type = other DNA
accatccccgtctcag

SEQ ID NO: 1766 - DNA, 16 bp, synthetic construct
  source 1..16: mol_type = other DNA
ggtagtcccctgaggc

SEQ ID NO: 1767 - DNA, 16 bp, synthetic construct
  source 1..16: mol_type = other DNA
tgaacctcccttctgt

SEQ ID NO: 1768 - DNA, 16 bp, synthetic construct
  source 1..16: mol_type = other DNA
gtaggcactgtcctta

SEQ ID NO: 1769 - DNA, 16 bp, synthetic construct
  source 1..16: mol_type = other DNA
agtctaggtcactgct

SEQ ID NO: 1770 - DNA, 16 bp, synthetic construct
  source 1..16: mol_type = other DNA
gcaactggatgagggc

SEQ ID NO: 1771 - DNA, 16 bp, synthetic construct
  source 1..16: mol_type = other DNA
acatgtgtcagtacac

SEQ ID NO: 1772 - DNA, 16 bp, synthetic construct
  source 1..16: mol_type = other DNA
ggagctgctctttcta

SEQ ID NO: 1773 - DNA, 16 bp, synthetic construct
  source 1..16: mol_type = other DNA
caacctatgtccctct

SEQ ID NO: 1774 - DNA, 16 bp, synthetic construct
  source 1..16: mol_type = other DNA
aggcttaaggctgcct

SEQ ID NO: 1775 - DNA, 16 bp, synthetic construct
  source 1..16: mol_type = other DNA
acagcctacagctgtt

SEQ ID NO: 1776 - DNA, 16 bp, synthetic construct
  source 1..16: mol_type = other DNA
aacttttctcgagctt

SEQ ID NO: 1777 - DNA, 16 bp, synthetic construct
  source 1..16: mol_type = other DNA
agcttctgcacgcctc

SEQ ID NO: 1778 - DNA, 16 bp, synthetic construct
  source 1..16: mol_type = other DNA
gcgagatccagctctc

SEQ ID NO: 1779 - DNA, 16 bp, synthetic construct
  source 1..16: mol_type = other DNA
tcctcttcggtcgccg

SEQ ID NO: 1780 - DNA, 16 bp, synthetic construct
  source 1..16: mol_type = other DNA
agtcgatacttgtcca

SEQ ID NO: 1781 - DNA, 16 bp, synthetic construct
  source 1..16: mol_type = other DNA
tgaagcagtagactgt

SEQ ID NO: 1782 - DNA, 16 bp, synthetic construct
  source 1..16: mol_type = other DNA
ggcgggtgcctgtccc

SEQ ID NO: 1783 - DNA, 16 bp, synthetic construct
  source 1..16: mol_type = other DNA
aatgttgtccagtaat

SEQ ID NO: 1784 - DNA, 16 bp, synthetic construct
  source 1..16: mol_type = other DNA
accttcccgaatgtcc

SEQ ID NO: 1785 - DNA, 16 bp, synthetic construct
  source 1..16: mol_type = other DNA
ctccatccgctcctgc

SEQ ID NO: 1786 - DNA, 16 bp, synthetic construct
  source 1..16: mol_type = other DNA
aatgtccgacagtgtc

SEQ ID NO: 1787 - DNA, 16 bp, synthetic construct
  source 1..16: mol_type = other DNA
tctaaagtggcccctc

SEQ ID NO: 1788 - DNA, 16 bp, synthetic construct
  source 1..16: mol_type = other DNA
atctatcatggctcac

SEQ ID NO: 1789 - DNA, 16 bp, synthetic construct
  source 1..16: mol_type = other DNA
tggcatacacctggcc

SEQ ID NO: 1790 - DNA, 16 bp, synthetic construct
  source 1..16: mol_type = other DNA
tcataggcgaatacac

SEQ ID NO: 1791 - DNA, 16 bp, synthetic construct
  source 1..16: mol_type = other DNA
gacaatcaggcctctc

SEQ ID NO: 1792 - DNA, 16 bp, synthetic construct
  source 1..16: mol_type = other DNA
gagaaatgttgcccca

SEQ ID NO: 1793 - DNA, 16 bp, synthetic construct
  source 1..16: mol_type = other DNA
gttacacacaggccaa

SEQ ID NO: 1794 - DNA, 16 bp, synthetic construct
  source 1..16: mol_type = other DNA
ctactaaagggaggcc

SEQ ID NO: 1795 - DNA, 16 bp, synthetic construct
  source 1..16: mol_type = other DNA
ggagagtgggccagca

SEQ ID NO: 1796 - DNA, 16 bp, synthetic construct
  source 1..16: mol_type = other DNA
caccatccccgtctca

SEQ ID NO: 1797 - DNA, 16 bp, synthetic construct
  source 1..16: mol_type = other DNA
taaatgaacctccctt

SEQ ID NO: 1798 - DNA, 16 bp, synthetic construct
  source 1..16: mol_type = other DNA
tccaaatccagtcccg

SEQ ID NO: 1799 - DNA, 16 bp, synthetic construct
  source 1..16: mol_type = other DNA
gtgaagagagacggcc

SEQ ID NO: 1800 - DNA, 16 bp, synthetic construct
  source 1..16: mol_type = other DNA
tgcaactggatgaggg

SEQ ID NO: 1801 - DNA, 16 bp, synthetic construct
  source 1..16: mol_type = other DNA
tgaagtacatagatct

SEQ ID NO: 1802 - DNA, 16 bp, synthetic construct
  source 1..16: mol_type = other DNA
ttaaatggccttattg

SEQ ID NO: 1803 - DNA, 16 bp, synthetic construct
  source 1..16: mol_type = other DNA
tttacttgtgataagc

SEQ ID NO: 1804 - DNA, 16 bp, synthetic construct
  source 1..16: mol_type = other DNA
ggtatagtatgtgtaa

SEQ ID NO: 1805 - DNA, 16 bp, synthetic construct
  source 1..16: mol_type = other DNA
gaggatgggttcaatc

SEQ ID NO: 1806 - DNA, 16 bp, synthetic construct
  source 1..16: mol_type = other DNA
ttaggaaaagccctgc

SEQ ID NO: 1807 - DNA, 16 bp, synthetic construct
  source 1..16: mol_type = other DNA
aacaaatcaggattcc

SEQ ID NO: 1808 - DNA, 16 bp, synthetic construct
  source 1..16: mol_type = other DNA
acactaacacaaccta

SEQ ID NO: 1809 - DNA, 16 bp, synthetic construct
  source 1..16: mol_type = other DNA
gtgtctatacacgccc

SEQ ID NO: 1810 - DNA, 16 bp, synthetic construct
  source 1..16: mol_type = other DNA
gttatctagggagatc

SEQ ID NO: 1811 - DNA, 16 bp, synthetic construct
  source 1..16: mol_type = other DNA
ggttgtccgtgcggat

SEQ ID NO: 1812 - DNA, 16 bp, synthetic construct
  source 1..16: mol_type = other DNA
tgtgatccccccagca

SEQ ID NO: 1813 - DNA, 16 bp, synthetic construct
  source 1..16: mol_type = other DNA
gtcctgtagcctgtca

SEQ ID NO: 1814 - DNA, 16 bp, synthetic construct
  source 1..16: mol_type = other DNA
catggtcacatatccc

SEQ ID NO: 1815 - DNA, 16 bp, synthetic construct
  source 1..16: mol_type = other DNA
aggatggttagggtgg

SEQ ID NO: 1816 - DNA, 16 bp, synthetic construct
  source 1..16: mol_type = other DNA
caatgctgaatggtgt

SEQ ID NO: 1817 - DNA, 16 bp, synthetic construct
  source 1..16: mol_type = other DNA
gtgatgatgcagtcct

SEQ ID NO: 1818 - DNA, 16 bp, synthetic construct
  source 1..16: mol_type = other DNA
gacactaagatttccc

SEQ ID NO: 1819 - DNA, 16 bp, synthetic construct
  source 1..16: mol_type = other DNA
atagattctggttcga

SEQ ID NO: 1820 - DNA, 16 bp, synthetic construct
  source 1..16: mol_type = other DNA
atcctacaggctctgt

SEQ ID NO: 1821 - DNA, 16 bp, synthetic construct
  source 1..16: mol_type = other DNA
ggcaactgagtccaag

SEQ ID NO: 1822 - DNA, 16 bp, synthetic construct
  source 1..16: mol_type = other DNA
gtcactcagactgtgc

SEQ ID NO: 1823 - DNA, 16 bp, synthetic construct
  source 1..16: mol_type = other DNA
gcaataatcaaagtcc

SEQ ID NO: 1824 - DNA, 16 bp, synthetic construct
  source 1..16: mol_type = other DNA
ggcttcagccagtgtc

SEQ ID NO: 1825 - DNA, 16 bp, synthetic construct
  source 1..16: mol_type = other DNA
ttgatctgtgaggtca

SEQ ID NO: 1826 - DNA, 16 bp, synthetic construct
  source 1..16: mol_type = other DNA
gggactggagcagtcc

SEQ ID NO: 1827 - DNA, 16 bp, synthetic construct
  source 1..16: mol_type = other DNA
tgtacttggcagtggg

SEQ ID NO: 1828 - DNA, 16 bp, synthetic construct
  source 1..16: mol_type = other DNA
gacaatagcaagggca

SEQ ID NO: 1829 - DNA, 16 bp, synthetic construct
  source 1..16: mol_type = other DNA
gtgactcgcaggtccg

SEQ ID NO: 1830 - DNA, 16 bp, synthetic construct
  source 1..16: mol_type = other DNA
tgcggctccgagagcc

SEQ ID NO: 1831 - DNA, 16 bp, synthetic construct
  source 1..16: mol_type = other DNA
agaacctgcccattgc

SEQ ID NO: 1832 - DNA, 16 bp, synthetic construct
  source 1..16: mol_type = other DNA
ggtgggtgcagaacct

SEQ ID NO: 1833 - DNA, 16 bp, synthetic construct
  source 1..16: mol_type = other DNA
tccctcttcctagtca

SEQ ID NO: 1834 - DNA, 16 bp, synthetic construct
  source 1..16: mol_type = other DNA
gcagattcactccccc

SEQ ID NO: 1835 - DNA, 16 bp, synthetic construct
  source 1..16: mol_type = other DNA
gttggtagtcccctga

SEQ ID NO: 1836 - DNA, 16 bp, synthetic construct
  source 1..16: mol_type = other DNA
ggtgctcctgctcaga

SEQ ID NO: 1837 - DNA, 16 bp, synthetic construct
  source 1..16: mol_type = other DNA
aaggtaggcactgtcc

SEQ ID NO: 1838 - DNA, 16 bp, synthetic construct
  source 1..16: mol_type = other DNA
gtaagtctaggtcact

SEQ ID NO: 1839 - DNA, 16 bp, synthetic construct
  source 1..16: mol_type = other DNA
agctgttgtagtccca

SEQ ID NO: 1840 - DNA, 16 bp, synthetic construct
  source 1..16: mol_type = other DNA
agtgcttacctgaggg

SEQ ID NO: 1841 - DNA, 16 bp, synthetic construct
  source 1..16: mol_type = other DNA
tctgtgtactacagac

SEQ ID NO: 1842 - DNA, 16 bp, synthetic construct
  source 1..16: mol_type = other DNA
aacatgtgtcagtaca

SEQ ID NO: 1843 - DNA, 16 bp, synthetic construct
  source 1..16: mol_type = other DNA
acctccacagatgtgg

SEQ ID NO: 1844 - DNA, 16 bp, synthetic construct
  source 1..16: mol_type = other DNA
tctctcccaattgtcc

SEQ ID NO: 1845 - DNA, 16 bp, synthetic construct
  source 1..16: mol_type = other DNA
cttacttaatgcccca

SEQ ID NO: 1846 - DNA, 16 bp, synthetic construct
  source 1..16: mol_type = other DNA
gcaatgatccaagccc

SEQ ID NO: 1847 - DNA, 16 bp, synthetic construct
  source 1..16: mol_type = other DNA
cgacctggcgaagttc

SEQ ID NO: 1848 - DNA, 16 bp, synthetic construct
  source 1..16: mol_type = other DNA
ggtgggcccgcactct

SEQ ID NO: 1849 - DNA, 16 bp, synthetic construct
  source 1..16: mol_type = other DNA
gcaacttttctcgagc

SEQ ID NO: 1850 - DNA, 16 bp, synthetic construct
  source 1..16: mol_type = other DNA
cccgagactgagcttc

SEQ ID NO: 1851 - DNA, 16 bp, synthetic construct
  source 1..16: mol_type = other DNA
ggcgagatccagctct

SEQ ID NO: 1852 - DNA, 16 bp, synthetic construct
  source 1..16: mol_type = other DNA
agagctggcgcgcttc

SEQ ID NO: 1853 - DNA, 16 bp, synthetic construct
  source 1..16: mol_type = other DNA
cagtcgatacttgtcc

SEQ ID NO: 1854 - DNA, 16 bp, synthetic construct
  source 1..16: mol_type = other DNA
cgcggtagcaggcctt

SEQ ID NO: 1855 - DNA, 16 bp, synthetic construct
  source 1..16: mol_type = other DNA
gtgattccccaacacc

SEQ ID NO: 1856 - DNA, 16 bp, synthetic construct
  source 1..16: mol_type = other DNA
aagcaaatttcccgag

SEQ ID NO: 1857 - DNA, 16 bp, synthetic construct
  source 1..16: mol_type = other DNA
atgtccgacagtgtct

SEQ ID NO: 1858 - DNA, 16 bp, synthetic construct
  source 1..16: mol_type = other DNA
caggatgttgtcgggt

SEQ ID NO: 1859 - DNA, 16 bp, synthetic construct
  source 1..16: mol_type = other DNA
ttattcgcgagggtcg

SEQ ID NO: 1860 - DNA, 16 bp, synthetic construct
  source 1..16: mol_type = other DNA
ttttattcgcgagggt

SEQ ID NO: 1861 - DNA, 16 bp, synthetic construct
  source 1..16: mol_type = other DNA
tcttaggagtctttgg

SEQ ID NO: 1862 - DNA, 16 bp, synthetic construct
  source 1..16: mol_type = other DNA
tttcataggcgaatac

SEQ ID NO: 1863 - DNA, 16 bp, synthetic construct
  source 1..16: mol_type = other DNA
tgacaatcaggcctct

SEQ ID NO: 1864 - DNA, 16 bp, synthetic construct
  source 1..16: mol_type = other DNA
tgcaggatggttaggg

SEQ ID NO: 1865 - DNA, 16 bp, synthetic construct
  source 1..16: mol_type = other DNA
agagaaatgttgcccc

SEQ ID NO: 1866 - DNA, 16 bp, synthetic construct
  source 1..16: mol_type = other DNA
cataggaaccgagact

SEQ ID NO: 1867 - DNA, 16 bp, synthetic construct
  source 1..16: mol_type = other DNA
tgttacacacaggcca

SEQ ID NO: 1868 - DNA, 16 bp, synthetic construct
  source 1..16: mol_type = other DNA
tctactaaagggaggc

SEQ ID NO: 1869 - DNA, 16 bp, synthetic construct
  source 1..16: mol_type = other DNA
gacaccatccccgtct

SEQ ID NO: 1870 - DNA, 16 bp, synthetic construct
  source 1..16: mol_type = other DNA
ataaatgaacctccct

SEQ ID NO: 1871 - DNA, 16 bp, synthetic construct
  source 1..16: mol_type = other DNA
gcacacttaagcctgg

SEQ ID NO: 1872 - DNA, 16 bp, synthetic construct
  source 1..16: mol_type = other DNA
ggtacctaccccgccc

SEQ ID NO: 1873 - DNA, 16 bp, synthetic construct
  source 1..16: mol_type = other DNA
tgtaagtctaggtcac

SEQ ID NO: 1874 - DNA, 16 bp, synthetic construct
  source 1..16: mol_type = other DNA
gttacacggtgaagag

SEQ ID NO: 1875 - DNA, 16 bp, synthetic construct
  source 1..16: mol_type = other DNA
ctagactgcaactgga

SEQ ID NO: 1876 - DNA, 16 bp, synthetic construct
  source 1..16: mol_type = other DNA
tgcaactccattggct

SEQ ID NO: 1877 - DNA, 16 bp, synthetic construct
  source 1..16: mol_type = other DNA
gcctaaattaatactt

SEQ ID NO: 1878 - DNA, 16 bp, synthetic construct
  source 1..16: mol_type = other DNA
gatatcaacttccttt

SEQ ID NO: 1879 - DNA, 16 bp, synthetic construct
  source 1..16: mol_type = other DNA
aaacatgtgtcagtac

SEQ ID NO: 1880 - DNA, 16 bp, synthetic construct
  source 1..16: mol_type = other DNA
aggtatagtatgtgta

SEQ ID NO: 1881 - DNA, 16 bp, synthetic construct
  source 1..16: mol_type = other DNA
tctaatagaggatggg

SEQ ID NO: 1882 - DNA, 16 bp, synthetic construct
  source 1..16: mol_type = other DNA
gccaatagcccctcct

SEQ ID NO: 1883 - DNA, 16 bp, synthetic construct
  source 1..16: mol_type = other DNA
cccttacttaatgccc

SEQ ID NO: 1884 - DNA, 16 bp, synthetic construct
  source 1..16: mol_type = other DNA
gaacaaatcaggattc

SEQ ID NO: 1885 - DNA, 16 bp, synthetic construct
  source 1..16: mol_type = other DNA
aacactaacacaacct

SEQ ID NO: 1886 - DNA, 16 bp, synthetic construct
  source 1..16: mol_type = other DNA
cccgatcccgacctgg

SEQ ID NO: 1887 - DNA, 16 bp, synthetic construct
  source 1..16: mol_type = other DNA
catggcatacacctgg

SEQ ID NO: 1888 - DNA, 16 bp, synthetic construct
  source 1..16: mol_type = other DNA
aagttctggttgtccg

SEQ ID NO: 1889 - DNA, 16 bp, synthetic construct
  source 1..16: mol_type = other DNA
aatggtctgtgatccc

SEQ ID NO: 1890 - DNA, 16 bp, synthetic construct
  source 1..16: mol_type = other DNA
ggtcctgtagcctgtc

SEQ ID NO: 1891 - DNA, 16 bp, synthetic construct
  source 1..16: mol_type = other DNA
aaaggtagcatggtca

SEQ ID NO: 1892 - DNA, 16 bp, synthetic construct
  source 1..16: mol_type = other DNA
cgcttctgcacccagc

SEQ ID NO: 1893 - DNA, 16 bp, synthetic construct
  source 1..16: mol_type = other DNA
gccaatgctgaatggt

SEQ ID NO: 1894 - DNA, 16 bp, synthetic construct
  source 1..16: mol_type = other DNA
agtgatgatgcagtcc

SEQ ID NO: 1895 - DNA, 16 bp, synthetic construct
  source 1..16: mol_type = other DNA
agacactaagatttcc

SEQ ID NO: 1896 - DNA, 16 bp, synthetic construct
  source 1..16: mol_type = other DNA
aatagattctggttcg

SEQ ID NO: 1897 - DNA, 16 bp, synthetic construct
  source 1..16: mol_type = other DNA
ggcaagcacatccacc

SEQ ID NO: 1898 - DNA, 16 bp, synthetic construct
  source 1..16: mol_type = other DNA
caagccacggcctcca

SEQ ID NO: 1899 - DNA, 16 bp, synthetic construct
  source 1..16: mol_type = other DNA
gactcaaccagactcc

SEQ ID NO: 1900 - DNA, 16 bp, synthetic construct
  source 1..16: mol_type = other DNA
cgcaataatcaaagtc

SEQ ID NO: 1901 - DNA, 16 bp, synthetic construct
  source 1..16: mol_type = other DNA
ggcttcacaccactgt

SEQ ID NO: 1902 - DNA, 16 bp, synthetic construct
  source 1..16: mol_type = other DNA
gttgatctgtgaggtc

SEQ ID NO: 1903 - DNA, 16 bp, synthetic construct
  source 1..16: mol_type = other DNA
aattttgtgcaggtgg

SEQ ID NO: 1904 - DNA, 16 bp, synthetic construct
  source 1..16: mol_type = other DNA
ttgtacttggcagtgg

SEQ ID NO: 1905 - DNA, 16 bp, synthetic construct
  source 1..16: mol_type = other DNA
ccataatttaacactc

SEQ ID NO: 1906 - DNA, 16 bp, synthetic construct
  source 1..16: mol_type = other DNA
gtgtgactcgcaggtc

SEQ ID NO: 1907 - DNA, 16 bp, synthetic construct
  source 1..16: mol_type = other DNA
cgcgggaagacacact

SEQ ID NO: 1908 - DNA, 16 bp, synthetic construct
  source 1..16: mol_type = other DNA
ggtgtgatgaatttca

SEQ ID NO: 1909 - DNA, 16 bp, synthetic construct
  source 1..16: mol_type = other DNA
ggcttgtggctcaggg

SEQ ID NO: 1910 - DNA, 16 bp, synthetic construct
  source 1..16: mol_type = other DNA
ggctcttgtccctctt

SEQ ID NO: 1911 - DNA, 16 bp, synthetic construct
  source 1..16: mol_type = other DNA
gtcactgggcagattc

SEQ ID NO: 1912 - DNA, 16 bp, synthetic construct
  source 1..16: mol_type = other DNA
ggtggttggtagtccc

SEQ ID NO: 1913 - DNA, 16 bp, synthetic construct
  source 1..16: mol_type = other DNA
gtgattcaggacccca

SEQ ID NO: 1914 - DNA, 16 bp, synthetic construct
  source 1..16: mol_type = other DNA
tcagctgttgtagtcc

SEQ ID NO: 1915 - DNA, 16 bp, synthetic construct
  source 1..16: mol_type = other DNA
agattctgggaagccc

SEQ ID NO: 1916 - DNA, 16 bp, synthetic construct
  source 1..16: mol_type = other DNA
ggctctgtgtactaca

SEQ ID NO: 1917 - DNA, 16 bp, synthetic construct
  source 1..16: mol_type = other DNA
gactgcttggctctgg

SEQ ID NO: 1918 - DNA, 16 bp, synthetic construct
  source 1..16: mol_type = other DNA
acagtgcacgccaccc

SEQ ID NO: 1919 - DNA, 16 bp, synthetic construct
  source 1..16: mol_type = other DNA
atagctcctgcaatga

SEQ ID NO: 1920 - DNA, 16 bp, synthetic construct
  source 1..16: mol_type = other DNA
ggtgtctatacacgcc

SEQ ID NO: 1921 - DNA, 16 bp, synthetic construct
  source 1..16: mol_type = other DNA
gaagatccgccctcct

SEQ ID NO: 1922 - DNA, 16 bp, synthetic construct
  source 1..16: mol_type = other DNA
ataggtgggcccgcac

SEQ ID NO: 1923 - DNA, 16 bp, synthetic construct
  source 1..16: mol_type = other DNA
agcaacttttctcgag

SEQ ID NO: 1924 - DNA, 16 bp, synthetic construct
  source 1..16: mol_type = other DNA
aggactaagggcgcga

SEQ ID NO: 1925 - DNA, 16 bp, synthetic construct
  source 1..16: mol_type = other DNA
gggaaggcgagatcca

SEQ ID NO: 1926 - DNA, 16 bp, synthetic construct
  source 1..16: mol_type = other DNA
gccgcctgcaaagtct

SEQ ID NO: 1927 - DNA, 16 bp, synthetic construct
  source 1..16: mol_type = other DNA
acttcttgcgcagtcg

SEQ ID NO: 1928 - DNA, 16 bp, synthetic construct
  source 1..16: mol_type = other DNA
ggttgccgcggtagca

SEQ ID NO: 1929 - DNA, 16 bp, synthetic construct
  source 1..16: mol_type = other DNA
ccgcagtgtgattccc

SEQ ID NO: 1930 - DNA, 16 bp, synthetic construct
  source 1..16: mol_type = other DNA
tatgtgtaatgttgtc

SEQ ID NO: 1931 - DNA, 16 bp, synthetic construct
  source 1..16: mol_type = other DNA
ggcggcacgagacaga

SEQ ID NO: 1932 - DNA, 14 bp, synthetic construct
  source 1..14: mol_type = other DNA
atgtgtaatgttgt

SEQ ID NO: 1933 - DNA, 16 bp, synthetic construct
  source 1..16: mol_type = other DNA
actgatcctgcaactc

SEQ ID NO: 1934 - DNA, 14 bp, synthetic construct
  source 1..14: mol_type = other DNA
tgtaatgttgtcca

SEQ ID NO: 1935 - DNA, 14 bp, synthetic construct
  source 1..14: mol_type = other DNA
gtaatgttgtccag

SEQ ID NO: 1936 - DNA, 16 bp, synthetic construct
  source 1..16: mol_type = other DNA
aacctatgtccctctg

SEQ ID NO: 1937 - DNA, 16 bp, synthetic construct
  source 1..16: mol_type = other DNA
cttcatggcatacacc

SEQ ID NO: 1938 - DNA, 16 bp, synthetic construct
  source 1..16: mol_type = other DNA
gcccatagaacatttc

SEQ ID NO: 1939 - DNA, 16 bp, synthetic construct
  source 1..16: mol_type = other DNA
tggaacacggacggcc

SEQ ID NO: 1940 - DNA, 16 bp, synthetic construct
  source 1..16: mol_type = other DNA
agctttgggcagatgg

SEQ ID NO: 1941 - DNA, 16 bp, synthetic construct
  source 1..16: mol_type = other DNA
acaaaggtagcatggt

SEQ ID NO: 1942 - DNA, 16 bp, synthetic construct
  source 1..16: mol_type = other DNA
aaacaaaagggctcgc

SEQ ID NO: 1943 - DNA, 16 bp, synthetic construct
  source 1..16: mol_type = other DNA
gctcataggaaccgag

SEQ ID NO: 1944 - DNA, 16 bp, synthetic construct
  source 1..16: mol_type = other DNA
gtttaccctgccaacc

SEQ ID NO: 1945 - DNA, 16 bp, synthetic construct
  source 1..16: mol_type = other DNA
tgacagcacgggctct

SEQ ID NO: 1946 - DNA, 16 bp, synthetic construct
  source 1..16: mol_type = other DNA
tttataagagtccccc

SEQ ID NO: 1947 - DNA, 16 bp, synthetic construct
  source 1..16: mol_type = other DNA
gataaatgaacctccc

SEQ ID NO: 1948 - DNA, 16 bp, synthetic construct
  source 1..16: mol_type = other DNA
agtgattcaggacccc

SEQ ID NO: 1949 - DNA, 16 bp, synthetic construct
  source 1..16: mol_type = other DNA
tgttacacggtgaaga

SEQ ID NO: 1950 - DNA, 16 bp, synthetic construct
  source 1..16: mol_type = other DNA
atctaaagtggcccct

SEQ ID NO: 1951 - DNA, 16 bp, synthetic construct
  source 1..16: mol_type = other DNA
agatatcaacttcctt

SEQ ID NO: 1952 - DNA, 16 bp, synthetic construct
  source 1..16: mol_type = other DNA
aaggtatagtatgtgt

SEQ ID NO: 1953 - DNA, 16 bp, synthetic construct
  source 1..16: mol_type = other DNA
ggctctacagtgcacg

SEQ ID NO: 1954 - DNA, 16 bp, synthetic construct
  source 1..16: mol_type = other DNA
caaactacctttcagg

SEQ ID NO: 1955 - DNA, 16 bp, synthetic construct
  source 1..16: mol_type = other DNA
tgctcaaacactaaca

SEQ ID NO: 1956 - DNA, 16 bp, synthetic construct
  source 1..16: mol_type = other DNA
tggaatccccatagct

SEQ ID NO: 1957 - DNA, 16 bp, synthetic construct
  source 1..16: mol_type = other DNA
ttacatgggaaggtgg

SEQ ID NO: 1958 - DNA, 16 bp, synthetic construct
  source 1..16: mol_type = other DNA
cccataggtgggcccg

SEQ ID NO: 1959 - DNA, 16 bp, synthetic construct
  source 1..16: mol_type = other DNA
gaagttctggttgtcc

SEQ ID NO: 1960 - DNA, 16 bp, synthetic construct
  source 1..16: mol_type = other DNA
atgacaatcaggcctc

SEQ ID NO: 1961 - DNA, 16 bp, synthetic construct
  source 1..16: mol_type = other DNA
gtgtgcaggatggtta

SEQ ID NO: 1962 - DNA, 16 bp, synthetic construct
  source 1..16: mol_type = other DNA
cgctcctgcagtgtga

SEQ ID NO: 1963 - DNA, 16 bp, synthetic construct
  source 1..16: mol_type = other DNA
gcagatgaggccctcc

SEQ ID NO: 1964 - DNA, 16 bp, synthetic construct
  source 1..16: mol_type = other DNA
tgtactgagacactaa

SEQ ID NO: 1965 - DNA, 16 bp, synthetic construct
  source 1..16: mol_type = other DNA
aagtttcacgatttaa

SEQ ID NO: 1966 - DNA, 16 bp, synthetic construct
  source 1..16: mol_type = other DNA
tactatgaccttccca

SEQ ID NO: 1967 - DNA, 16 bp, synthetic construct
  source 1..16: mol_type = other DNA
aggatctgaggaacca

SEQ ID NO: 1968 - DNA, 16 bp, synthetic construct
  source 1..16: mol_type = other DNA
tgaactacggagacag

SEQ ID NO: 1969 - DNA, 16 bp, synthetic construct
  source 1..16: mol_type = other DNA
cactttcacgcaataa

SEQ ID NO: 1970 - DNA, 16 bp, synthetic construct
  source 1..16: mol_type = other DNA
catggcttcacaccac

SEQ ID NO: 1971 - DNA, 16 bp, synthetic construct
  source 1..16: mol_type = other DNA
gttagtcttgttaata

SEQ ID NO: 1972 - DNA, 16 bp, synthetic construct
  source 1..16: mol_type = other DNA
aaattttgtgcaggtg

SEQ ID NO: 1973 - DNA, 16 bp, synthetic construct
  source 1..16: mol_type = other DNA
gtcattgtacttggca

SEQ ID NO: 1974 - DNA, 16 bp, synthetic construct
  source 1..16: mol_type = other DNA
ggtcctgcgggacagg

SEQ ID NO: 1975 - DNA, 16 bp, synthetic construct
  source 1..16: mol_type = other DNA
gttgtgtgactcgcag

SEQ ID NO: 1976 - DNA, 16 bp, synthetic construct
  source 1..16: mol_type = other DNA
acagaaacatttcggg

SEQ ID NO: 1977 - DNA, 16 bp, synthetic construct
  source 1..16: mol_type = other DNA
gagaatctcagctgtc

SEQ ID NO: 1978 - DNA, 16 bp, synthetic construct
  source 1..16: mol_type = other DNA
cagagaaatgttgccc

SEQ ID NO: 1979 - DNA, 16 bp, synthetic construct
  source 1..16: mol_type = other DNA
ttgttacacacaggcc

SEQ ID NO: 1980 - DNA, 16 bp, synthetic construct
  source 1..16: mol_type = other DNA
ggaggcttgtggctca

SEQ ID NO: 1981 - DNA, 16 bp, synthetic construct
  source 1..16: mol_type = other DNA
aactttcctgggatgt

SEQ ID NO: 1982 - DNA, 16 bp, synthetic construct
  source 1..16: mol_type = other DNA
gggtggttggtagtcc

SEQ ID NO: 1983 - DNA, 16 bp, synthetic construct
  source 1..16: mol_type = other DNA
aatactccgccacaca

SEQ ID NO: 1984 - DNA, 16 bp, synthetic construct
  source 1..16: mol_type = other DNA
cacaggtacctacccc

SEQ ID NO: 1985 - DNA, 16 bp, synthetic construct
  source 1..16: mol_type = other DNA
gactgtaagtctaggt

SEQ ID NO: 1986 - DNA, 16 bp, synthetic construct
  source 1..16: mol_type = other DNA
aattctctagactgca

SEQ ID NO: 1987 - DNA, 16 bp, synthetic construct
  source 1..16: mol_type = other DNA
acagtaaggttccaag

SEQ ID NO: 1988 - DNA, 16 bp, synthetic construct
  source 1..16: mol_type = other DNA
aagattctgggaagcc

SEQ ID NO: 1989 - DNA, 16 bp, synthetic construct
  source 1..16: mol_type = other DNA
ccaagttctgaagtcc

SEQ ID NO: 1990 - DNA, 16 bp, synthetic construct
  source 1..16: mol_type = other DNA
gggttctgattctcct

SEQ ID NO: 1991 - DNA, 16 bp, synthetic construct
  source 1..16: mol_type = other DNA
aacacctgttctccac

SEQ ID NO: 1992 - DNA, 16 bp, synthetic construct
  source 1..16: mol_type = other DNA
gggttctaatagagga

SEQ ID NO: 1993 - DNA, 16 bp, synthetic construct
  source 1..16: mol_type = other DNA
catgtgaccgctgcag

SEQ ID NO: 1994 - DNA, 16 bp, synthetic construct
  source 1..16: mol_type = other DNA
cctgatttgaggaagg

SEQ ID NO: 1995 - DNA, 16 bp, synthetic construct
  source 1..16: mol_type = other DNA
acccttacttaatgcc

SEQ ID NO: 1996 - DNA, 16 bp, synthetic construct
  source 1..16: mol_type = other DNA
gttgccaccggcccgc

SEQ ID NO: 1997 - DNA, 16 bp, synthetic construct
  source 1..16: mol_type = other DNA
gttgattggctgcccg

SEQ ID NO: 1998 - DNA, 16 bp, synthetic construct
  source 1..16: mol_type = other DNA
tgcagcaacttttctc

SEQ ID NO: 1999 - DNA, 16 bp, synthetic construct
  source 1..16: mol_type = other DNA
gtaacgggccgtccag

SEQ ID NO: 2000 - DNA, 16 bp, synthetic construct
  source 1..16: mol_type = other DNA
tcgatcttctttctgg

SEQ ID NO: 2001 - DNA, 16 bp, synthetic construct
  source 1..16: mol_type = other DNA
ggcagtgcgcccagga

SEQ ID NO: 2002 - DNA, 16 bp, synthetic construct
  source 1..16: mol_type = other DNA
ggaacttcttgcgcag

SEQ ID NO: 2003 - DNA, 16 bp, synthetic construct
  source 1..16: mol_type = other DNA
ttgaaccagttgctga

SEQ ID NO: 2004 - DNA, 16 bp, synthetic construct
  source 1..16: mol_type = other DNA
tcagtccctctagtgc

SEQ ID NO: 2005 - DNA, 16 bp, synthetic construct
  source 1..16: mol_type = other DNA
cagcgagtcggaggac

SEQ ID NO: 2006 - DNA, 16 bp, synthetic construct
  source 1..16: mol_type = other DNA
ttattgttatatggct

SEQ ID NO: 2007 - DNA, 16 bp, synthetic construct
  source 1..16: mol_type = other DNA
gcacgacacctcgccc

SEQ ID NO: 2008 - DNA, 16 bp, synthetic construct
  source 1..16: mol_type = other DNA
aagcacgacacctcgc

SEQ ID NO: 2009 - DNA, 16 bp, synthetic construct
  source 1..16: mol_type = other DNA
agaacatttcataggc

SEQ ID NO: 2010 - DNA, 16 bp, synthetic construct
  source 1..16: mol_type = other DNA
tcagaagtcaaggtcc

SEQ ID NO: 2011 - DNA, 16 bp, synthetic construct
  source 1..16: mol_type = other DNA
atcttcatggcataca

SEQ ID NO: 2012 - DNA, 16 bp, synthetic construct
  source 1..16: mol_type = other DNA
gacgatcttgccatag

SEQ ID NO: 2013 - DNA, 16 bp, synthetic construct
  source 1..16: mol_type = other DNA
ttgactggcgaagttc

SEQ ID NO: 2014 - DNA, 16 bp, synthetic construct
  source 1..16: mol_type = other DNA
gaggatggaacacgga

SEQ ID NO: 2015 - DNA, 16 bp, synthetic construct
  source 1..16: mol_type = other DNA
ttaaactgggcagcct

SEQ ID NO: 2016 - DNA, 16 bp, synthetic construct
  source 1..16: mol_type = other DNA
gatgacaatcaggcct

SEQ ID NO: 2017 - DNA, 16 bp, synthetic construct
  source 1..16: mol_type = other DNA
tcccatagaggtgaga

SEQ ID NO: 2018 - DNA, 16 bp, synthetic construct
  source 1..16: mol_type = other DNA
aaaacaaaagggctcg

SEQ ID NO: 2019 - DNA, 16 bp, synthetic construct
  source 1..16: mol_type = other DNA
ggtggcataggacaga

SEQ ID NO: 2020 - DNA, 16 bp, synthetic construct
  source 1..16: mol_type = other DNA
agaactaaaggacgca

SEQ ID NO: 2021 - DNA, 16 bp, synthetic construct
  source 1..16: mol_type = other DNA
ctttataagagtcccc

SEQ ID NO: 2022 - DNA, 16 bp, synthetic construct
  source 1..16: mol_type = other DNA
gccaaatcagagacca

SEQ ID NO: 2023 - DNA, 16 bp, synthetic construct
  source 1..16: mol_type = other DNA
ggataaatgaacctcc

SEQ ID NO: 2024 - DNA, 16 bp, synthetic construct
  source 1..16: mol_type = other DNA
ctaatactccgccaca

SEQ ID NO: 2025 - DNA, 16 bp, synthetic construct
  source 1..16: mol_type = other DNA
ctctaattctctagac

SEQ ID NO: 2026 - DNA, 16 bp, synthetic construct
  source 1..16: mol_type = other DNA
aaacagtaaggttcca

SEQ ID NO: 2027 - DNA, 16 bp, synthetic construct
  source 1..16: mol_type = other DNA
caagattctgggaagc

SEQ ID NO: 2028 - DNA, 16 bp, synthetic construct
  source 1..16: mol_type = other DNA
gagatatcaacttcct

SEQ ID NO: 2029 - DNA, 16 bp, synthetic construct
  source 1..16: mol_type = other DNA
accaactgttctctta

SEQ ID NO: 2030 - DNA, 16 bp, synthetic construct
  source 1..16: mol_type = other DNA
ataaggtatagtatgt

SEQ ID NO: 2031 - DNA, 16 bp, synthetic construct
  source 1..16: mol_type = other DNA
ggacatgcgcctgggt

SEQ ID NO: 2032 - DNA, 16 bp, synthetic construct
  source 1..16: mol_type = other DNA
ccaaactacctttcag

SEQ ID NO: 2033 - DNA, 16 bp, synthetic construct
  source 1..16: mol_type = other DNA
atctacacagggacca

SEQ ID NO: 2034 - DNA, 16 bp, synthetic construct
  source 1..16: mol_type = other DNA
tcttacatgggaaggt

SEQ ID NO: 2035 - DNA, 16 bp, synthetic construct
  source 1..16: mol_type = other DNA
tgcaggtggttcttga

SEQ ID NO: 2036 - DNA, 16 bp, synthetic construct
  source 1..16: mol_type = other DNA
tggatgcgcgggcaca

SEQ ID NO: 2037 - DNA, 16 bp, synthetic construct
  source 1..16: mol_type = other DNA
tgcagatgaggccctc

SEQ ID NO: 2038 - DNA, 16 bp, synthetic construct
  source 1..16: mol_type = other DNA
tcttgtactgagacac

SEQ ID NO: 2039 - DNA, 16 bp, synthetic construct
  source 1..16: mol_type = other DNA
caaaaaagtttcacga

SEQ ID NO: 2040 - DNA, 16 bp, synthetic construct
  source 1..16: mol_type = other DNA
ctactatgaccttccc

SEQ ID NO: 2041 - DNA, 16 bp, synthetic construct
  source 1..16: mol_type = other DNA
acgattccaaaactga

SEQ ID NO: 2042 - DNA, 16 bp, synthetic construct
  source 1..16: mol_type = other DNA
gtgaactacggagaca

SEQ ID NO: 2043 - DNA, 16 bp, synthetic construct
  source 1..16: mol_type = other DNA
ggcagtcagcactttc

SEQ ID NO: 2044 - DNA, 16 bp, synthetic construct
  source 1..16: mol_type = other DNA
tccatggcttcacacc

SEQ ID NO: 2045 - DNA, 16 bp, synthetic construct
  source 1..16: mol_type = other DNA
atggttagtcttgtta

SEQ ID NO: 2046 - DNA, 16 bp, synthetic construct
  source 1..16: mol_type = other DNA
caaattttgtgcaggt

SEQ ID NO: 2047 - DNA, 16 bp, synthetic construct
  source 1..16: mol_type = other DNA
ggtcattgtacttggc

SEQ ID NO: 2048 - DNA, 16 bp, synthetic construct
  source 1..16: mol_type = other DNA
tataaataagaggtcc

SEQ ID NO: 2049 - DNA, 16 bp, synthetic construct
  source 1..16: mol_type = other DNA
gtcaccagttgtgtga

SEQ ID NO: 2050 - DNA, 16 bp, synthetic construct
  source 1..16: mol_type = other DNA
aacagaaacatttcgg

SEQ ID NO: 2051 - DNA, 16 bp, synthetic construct
  source 1..16: mol_type = other DNA
ggagaatctcagctgt

SEQ ID NO: 2052 - DNA, 16 bp, synthetic construct
  source 1..16: mol_type = other DNA
acagtttgttacacac

SEQ ID NO: 2053 - DNA, 16 bp, synthetic construct
  source 1..16: mol_type = other DNA
agtgctcctcccggga

SEQ ID NO: 2054 - DNA, 16 bp, synthetic construct
  source 1..16: mol_type = other DNA
tcaagtcaggctcccg

SEQ ID NO: 2055 - DNA, 16 bp, synthetic construct
  source 1..16: mol_type = other DNA
tccagtgacagcacgg

SEQ ID NO: 2056 - DNA, 16 bp, synthetic construct
  source 1..16: mol_type = other DNA
gtcatgggtggttggt

SEQ ID NO: 2057 - DNA, 16 bp, synthetic construct
  source 1..16: mol_type = other DNA
gaggttcccgcagccg

SEQ ID NO: 2058 - DNA, 16 bp, synthetic construct
  source 1..16: mol_type = other DNA
ggaatgagtgattcag

SEQ ID NO: 2059 - DNA, 16 bp, synthetic construct
  source 1..16: mol_type = other DNA
tggactgtaagtctag

SEQ ID NO: 2060 - DNA, 16 bp, synthetic construct
  source 1..16: mol_type = other DNA
gcttgttacacggtga

SEQ ID NO: 2061 - DNA, 16 bp, synthetic construct
  source 1..16: mol_type = other DNA
ttatctaaagtggccc

SEQ ID NO: 2062 - DNA, 16 bp, synthetic construct
  source 1..16: mol_type = other DNA
tgattgtaaaagtcta

SEQ ID NO: 2063 - DNA, 16 bp, synthetic construct
  source 1..16: mol_type = other DNA
gcctgtaaattagtac

SEQ ID NO: 2064 - DNA, 16 bp, synthetic construct
  source 1..16: mol_type = other DNA
acatgtgaccgctgca

SEQ ID NO: 2065 - DNA, 16 bp, synthetic construct
  source 1..16: mol_type = other DNA
aacttctggcctgtgg

SEQ ID NO: 2066 - DNA, 16 bp, synthetic construct
  source 1..16: mol_type = other DNA
gggctctacagtgcac

SEQ ID NO: 2067 - DNA, 16 bp, synthetic construct
  source 1..16: mol_type = other DNA
tcagatccccagcaac

SEQ ID NO: 2068 - DNA, 16 bp, synthetic construct
  source 1..16: mol_type = other DNA
catttctggaatcccc

SEQ ID NO: 2069 - DNA, 16 bp, synthetic construct
  source 1..16: mol_type = other DNA
gtgagtccgtccgggc

SEQ ID NO: 2070 - DNA, 16 bp, synthetic construct
  source 1..16: mol_type = other DNA
tgttgattggctgccc

SEQ ID NO: 2071 - DNA, 16 bp, synthetic construct
  source 1..16: mol_type = other DNA
ggctcctgggactcgc

SEQ ID NO: 2072 - DNA, 16 bp, synthetic construct
  source 1..16: mol_type = other DNA
gctagaaagtttgcag

SEQ ID NO: 2073 - DNA, 16 bp, synthetic construct
  source 1..16: mol_type = other DNA
gaaggtaacgggccgt

SEQ ID NO: 2074 - DNA, 16 bp, synthetic construct
  source 1..16: mol_type = other DNA
gctcttctcgatcttc

SEQ ID NO: 2075 - DNA, 16 bp, synthetic construct
  source 1..16: mol_type = other DNA
cgcaacaccgggtcgc

SEQ ID NO: 2076 - DNA, 16 bp, synthetic construct
  source 1..16: mol_type = other DNA
agcgggaacttcttgc

SEQ ID NO: 2077 - DNA, 16 bp, synthetic construct
  source 1..16: mol_type = other DNA
tccggtcgcgctgtcg

SEQ ID NO: 2078 - DNA, 16 bp, synthetic construct
  source 1..16: mol_type = other DNA
agagtaacggtcagtg

SEQ ID NO: 2079 - DNA, 16 bp, synthetic construct
  source 1..16: mol_type = other DNA
tattgttatatggctg

SEQ ID NO: 2080 - DNA, 16 bp, synthetic construct
  source 1..16: mol_type = other DNA
cagaagtcaaggtcct

SEQ ID NO: 2081 - DNA, 16 bp, synthetic construct
  source 1..16: mol_type = other DNA
tctcatgtagaatgtc

SEQ ID NO: 2082 - DNA, 16 bp, synthetic construct
  source 1..16: mol_type = other DNA
tgttatatggctgatt

SEQ ID NO: 2083 - DNA, 16 bp, synthetic construct
  source 1..16: mol_type = other DNA
ggaaacaagtgtcaca

SEQ ID NO: 2084 - DNA, 16 bp, synthetic construct
  source 1..16: mol_type = other DNA
tctcagtttaccctgc

SEQ ID NO: 2085 - DNA, 16 bp, synthetic construct
  source 1..16: mol_type = other DNA
ttatatggctgattca

SEQ ID NO: 2086 - DNA, 16 bp, synthetic construct
  source 1..16: mol_type = other DNA
gcgaagtgcagctgcg

SEQ ID NO: 2087 - DNA, 16 bp, synthetic construct
  source 1..16: mol_type = other DNA
cgaaccaacgataggt

SEQ ID NO: 2088 - DNA, 16 bp, synthetic construct
  source 1..16: mol_type = other DNA
gttaaactgggcagcc

SEQ ID NO: 2089 - DNA, 16 bp, synthetic construct
  source 1..16: mol_type = other DNA
tcagatgcaggtggtt

SEQ ID NO: 2090 - DNA, 16 bp, synthetic construct
  source 1..16: mol_type = other DNA
ccaaaaatgccctccc

SEQ ID NO: 2091 - DNA, 16 bp, synthetic construct
  source 1..16: mol_type = other DNA
cgagatagtgagacag

SEQ ID NO: 2092 - DNA, 16 bp, synthetic construct
  source 1..16: mol_type = other DNA
acacacagtttgttac

SEQ ID NO: 2093 - DNA, 16 bp, synthetic construct
  source 1..16: mol_type = other DNA
cacaaaaggagtgctc

SEQ ID NO: 2094 - DNA, 16 bp, synthetic construct
  source 1..16: mol_type = other DNA
gtcaagtcaggctccc

SEQ ID NO: 2095 - DNA, 16 bp, synthetic construct
  source 1..16: mol_type = other DNA
tctttataagagtccc

SEQ ID NO: 2096 - DNA, 16 bp, synthetic construct
  source 1..16: mol_type = other DNA
accatagagatctgcc

SEQ ID NO: 2097 - DNA, 16 bp, synthetic construct
  source 1..16: mol_type = other DNA
cgtcatgggtggttgg

SEQ ID NO: 2098 - DNA, 16 bp, synthetic construct
  source 1..16: mol_type = other DNA
gggataaatgaacctc

SEQ ID NO: 2099 - DNA, 16 bp, synthetic construct
  source 1..16: mol_type = other DNA
tctaatactccgccac

SEQ ID NO: 2100 - DNA, 16 bp, synthetic construct
  source 1..16: mol_type = other DNA
ctttatggagggagca

SEQ ID NO: 2101 - DNA, 16 bp, synthetic construct
  source 1..16: mol_type = other DNA
gggaatgagtgattca

SEQ ID NO: 2102 - DNA, 16 bp, synthetic construct
  source 1..16: mol_type = other DNA
ctggactgtaagtcta

SEQ ID NO: 2103 - DNA, 16 bp, synthetic construct
  source 1..16: mol_type = other DNA
tgccatgacagcttgt

SEQ ID NO: 2104 - DNA, 16 bp, synthetic construct
  source 1..16: mol_type = other DNA
gcttatctaaagtggc

SEQ ID NO: 2105 - DNA, 16 bp, synthetic construct
  source 1..16: mol_type = other DNA
caaaacagtaaggttc

SEQ ID NO: 2106 - DNA, 16 bp, synthetic construct
  source 1..16: mol_type = other DNA
gttacaagattctggg

SEQ ID NO: 2107 - DNA, 16 bp, synthetic construct
  source 1..16: mol_type = other DNA
cacgattttttcaatt

SEQ ID NO: 2108 - DNA, 16 bp, synthetic construct
  source 1..16: mol_type = other DNA
cgagatatcaacttcc

SEQ ID NO: 2109 - DNA, 16 bp, synthetic construct
  source 1..16: mol_type = other DNA
gctgactagaaaacca

SEQ ID NO: 2110 - DNA, 16 bp, synthetic construct
  source 1..16: mol_type = other DNA
atgataaggtatagta

SEQ ID NO: 2111 - DNA, 16 bp, synthetic construct
  source 1..16: mol_type = other DNA
tggacatgcgcctggg

SEQ ID NO: 2112 - DNA, 16 bp, synthetic construct
  source 1..16: mol_type = other DNA
cttgacatgtgaccgc

SEQ ID NO: 2113 - DNA, 16 bp, synthetic construct
  source 1..16: mol_type = other DNA
ccctagagggctctac

SEQ ID NO: 2114 - DNA, 16 bp, synthetic construct
  source 1..16: mol_type = other DNA
aatgattcagccaaac

SEQ ID NO: 2115 - DNA, 16 bp, synthetic construct
  source 1..16: mol_type = other DNA
aaatctacacagggac

SEQ ID NO: 2116 - DNA, 16 bp, synthetic construct
  source 1..16: mol_type = other DNA
cggcatgggcctctga

SEQ ID NO: 2117 - DNA, 16 bp, synthetic construct
  source 1..16: mol_type = other DNA
tgaagtctcgagcctc

SEQ ID NO: 2118 - DNA, 16 bp, synthetic construct
  source 1..16: mol_type = other DNA
gttgactggcgaagtt

SEQ ID NO: 2119 - DNA, 16 bp, synthetic construct
  source 1..16: mol_type = other DNA
cagatgacaatcaggc

SEQ ID NO: 2120 - DNA, 16 bp, synthetic construct
  source 1..16: mol_type = other DNA
gtggatgcgcgggcac

SEQ ID NO: 2121 - DNA, 16 bp, synthetic construct
  source 1..16: mol_type = other DNA
gtcttgtactgagaca

SEQ ID NO: 2122 - DNA, 16 bp, synthetic construct
  source 1..16: mol_type = other DNA
tcaaaaaagtttcacg

SEQ ID NO: 2123 - DNA, 16 bp, synthetic construct
  source 1..16: mol_type = other DNA
cctactatgaccttcc

SEQ ID NO: 2124 - DNA, 16 bp, synthetic construct
  source 1..16: mol_type = other DNA
tacgattccaaaactg

SEQ ID NO: 2125 - DNA, 16 bp, synthetic construct
  source 1..16: mol_type = other DNA
ggcctcggtctcctcg

SEQ ID NO: 2126 - DNA, 16 bp, synthetic construct
  source 1..16: mol_type = other DNA
tcttagctagcttcct

SEQ ID NO: 2127 - DNA, 16 bp, synthetic construct
  source 1..16: mol_type = other DNA
atccatggcttcacac

SEQ ID NO: 2128 - DNA, 16 bp, synthetic construct
  source 1..16: mol_type = other DNA
tcatggttagtcttgt

SEQ ID NO: 2129 - DNA, 16 bp, synthetic construct
  source 1..16: mol_type = other DNA
ccaaattttgtgcagg

SEQ ID NO: 2130 - DNA, 16 bp, synthetic construct
  source 1..16: mol_type = other DNA
gtaacactgatgtttc

SEQ ID NO: 2131 - DNA, 16 bp, synthetic construct
  source 1..16: mol_type = other DNA
gtataaataagaggtc

SEQ ID NO: 2132 - DNA, 16 bp, synthetic construct
  source 1..16: mol_type = other DNA
tggtgtgggtcaccag

SEQ ID NO: 2133 - DNA, 16 bp, synthetic construct
  source 1..16: mol_type = other DNA
caaaatagctccttgg

SEQ ID NO: 2134 - DNA, 16 bp, synthetic construct
  source 1..16: mol_type = other DNA
tgcatggagaatctca

SEQ ID NO: 2135 - DNA, 16 bp, synthetic construct
  source 1..16: mol_type = other DNA
gaccttactctgcccc

SEQ ID NO: 2136 - DNA, 16 bp, synthetic construct
  source 1..16: mol_type = other DNA
gttttgtgggacagct

SEQ ID NO: 2137 - DNA, 16 bp, synthetic construct
  source 1..16: mol_type = other DNA
ccaatcctagagcttc

SEQ ID NO: 2138 - DNA, 16 bp, synthetic construct
  source 1..16: mol_type = other DNA
gtatcctgttgcttcc

SEQ ID NO: 2139 - DNA, 16 bp, synthetic construct
  source 1..16: mol_type = other DNA
ctgattgtaaaagtct

SEQ ID NO: 2140 - DNA, 16 bp, synthetic construct
  source 1..16: mol_type = other DNA
agaacttctggcctgt

SEQ ID NO: 2141 - DNA, 16 bp, synthetic construct
  source 1..16: mol_type = other DNA
gacttctcagatcccc

SEQ ID NO: 2142 - DNA, 16 bp, synthetic construct
  source 1..16: mol_type = other DNA
tactcctccgtcccct

SEQ ID NO: 2143 - DNA, 16 bp, synthetic construct
  source 1..16: mol_type = other DNA
gacggtgagtccgtcc

SEQ ID NO: 2144 - DNA, 16 bp, synthetic construct
  source 1..16: mol_type = other DNA
ggtcttacatgggaag

SEQ ID NO: 2145 - DNA, 16 bp, synthetic construct
  source 1..16: mol_type = other DNA
gtgttgattggctgcc

SEQ ID NO: 2146 - DNA, 16 bp, synthetic construct
  source 1..16: mol_type = other DNA
ggctagaaagtttgca

SEQ ID NO: 2147 - DNA, 16 bp, synthetic construct
  source 1..16: mol_type = other DNA
cgctttctgcctcccc

SEQ ID NO: 2148 - DNA, 16 bp, synthetic construct
  source 1..16: mol_type = other DNA
aactttgggaagttcc

SEQ ID NO: 2149 - DNA, 16 bp, synthetic construct
  source 1..16: mol_type = other DNA
cgcaggtagaggtcct

SEQ ID NO: 2150 - DNA, 16 bp, synthetic construct
  source 1..16: mol_type = other DNA
tggtcttgggcagcgg

SEQ ID NO: 2151 - DNA, 16 bp, synthetic construct
  source 1..16: mol_type = other DNA
tggacttgcgccgccc

SEQ ID NO: 2152 - DNA, 16 bp, synthetic construct
  source 1..16: mol_type = other DNA
aagagtaacggtcagt

SEQ ID NO: 2153 - DNA, 16 bp, synthetic construct
  source 1..16: mol_type = other DNA
atatggctgattcaaa

SEQ ID NO: 2154 - DNA, 16 bp, synthetic construct
  source 1..16: mol_type = other DNA
atgtagaatgtcctgg

SEQ ID NO: 2155 - DNA, 16 bp, synthetic construct
  source 1..16: mol_type = other DNA
ggaaataagacccagt

SEQ ID NO: 2156 - DNA, 16 bp, synthetic construct
  source 1..16: mol_type = other DNA
gaaggaaataagaccc

SEQ ID NO: 2157 - DNA, 16 bp, synthetic construct
  source 1..16: mol_type = other DNA
atgtntaatgttgtcc

SEQ ID NO: 2158 - DNA, 16 bp, synthetic construct
  source 1..16: mol_type = other DNA
agggccttttattcgc

SEQ ID NO: 2159 - DNA, 16 bp, synthetic construct
  source 1..16: mol_type = other DNA
gtctatggccatgaca

SEQ ID NO: 2160 - DNA, 16 bp, synthetic construct
  source 1..16: mol_type = other DNA
ctgaatgaagtctcga

SEQ ID NO: 2161 - DNA, 16 bp, synthetic construct
  source 1..16: mol_type = other DNA
cactttgcgaaccaac

SEQ ID NO: 2162 - DNA, 16 bp, synthetic construct
  source 1..16: mol_type = other DNA
tgttaaactgggcagc

SEQ ID NO: 2163 - DNA, 16 bp, synthetic construct
  source 1..16: mol_type = other DNA
tgctttagtcctaccc

SEQ ID NO: 2164 - DNA, 16 bp, synthetic construct
  source 1..16: mol_type = other DNA
gccaaaaatgccctcc

SEQ ID NO: 2165 - DNA, 16 bp, synthetic construct
  source 1..16: mol_type = other DNA
tcgagatagtgagaca

SEQ ID NO: 2166 - DNA, 16 bp, synthetic construct
  source 1..16: mol_type = other DNA
ggttttgtgggacagc

SEQ ID NO: 2167 - DNA, 16 bp, synthetic construct
  source 1..16: mol_type = other DNA
gccacaaaaggagtgc

SEQ ID NO: 2168 - DNA, 16 bp, synthetic construct
  source 1..16: mol_type = other DNA
atctttataagagtcc

SEQ ID NO: 2169 - DNA, 16 bp, synthetic construct
  source 1..16: mol_type = other DNA
aaccatagagatctgc

SEQ ID NO: 2170 - DNA, 16 bp, synthetic construct
  source 1..16: mol_type = other DNA
tgctatcccctcggcc

SEQ ID NO: 2171 - DNA, 16 bp, synthetic construct
  source 1..16: mol_type = other DNA
tgggataaatgaacct

SEQ ID NO: 2172 - DNA, 16 bp, synthetic construct
  source 1..16: mol_type = other DNA
gtctaatactccgcca

SEQ ID NO: 2173 - DNA, 16 bp, synthetic construct
  source 1..16: mol_type = other DNA
actttatggagggagc

SEQ ID NO: 2174 - DNA, 16 bp, synthetic construct
  source 1..16: mol_type = other DNA
agtagatgggcacaga

SEQ ID NO: 2175 - DNA, 16 bp, synthetic construct
  source 1..16: mol_type = other DNA
cagtattgttcagcaa

SEQ ID NO: 2176 - DNA, 16 bp, synthetic construct
  source 1..16: mol_type = other DNA
ttacatgttcccccca

SEQ ID NO: 2177 - DNA, 16 bp, synthetic construct
  source 1..16: mol_type = other DNA
ggttacaagattctgg

SEQ ID NO: 2178 - DNA, 16 bp, synthetic construct
  source 1..16: mol_type = other DNA
actgattgtaaaagtc

SEQ ID NO: 2179 - DNA, 16 bp, synthetic construct
  source 1..16: mol_type = other DNA
ggcacgattttttcaa

SEQ ID NO: 2180 - DNA, 16 bp, synthetic construct
  source 1..16: mol_type = other DNA
acgagatatcaacttc

SEQ ID NO: 2181 - DNA, 16 bp, synthetic construct
  source 1..16: mol_type = other DNA
aatgataaggtatagt

SEQ ID NO: 2182 - DNA, 16 bp, synthetic construct
  source 1..16: mol_type = other DNA
agctatcctggacatg

SEQ ID NO: 2183 - DNA, 16 bp, synthetic construct
  source 1..16: mol_type = other DNA
cagaatgctgattctc

SEQ ID NO: 2184 - DNA, 16 bp, synthetic construct
  source 1..16: mol_type = other DNA
taaatctacacaggga

SEQ ID NO: 2185 - DNA, 16 bp, synthetic construct
  source 1..16: mol_type = other DNA
gtaaggacggtgagtc

SEQ ID NO: 2186 - DNA, 16 bp, synthetic construct
  source 1..16: mol_type = other DNA
cctatatctggacggg

SEQ ID NO: 2187 - DNA, 16 bp, synthetic construct
  source 1..16: mol_type = other DNA
ggcactcagtcttcca

SEQ ID NO: 2188 - DNA, 16 bp, synthetic construct
  source 1..16: mol_type = other DNA
tagattcagatgcagg

SEQ ID NO: 2189 - DNA, 16 bp, synthetic construct
  source 1..16: mol_type = other DNA
ttcttgcacacaaggg

SEQ ID NO: 2190 - DNA, 16 bp, synthetic construct
  source 1..16: mol_type = other DNA
acgaaaggtcctgcca

SEQ ID NO: 2191 - DNA, 16 bp, synthetic construct
  source 1..16: mol_type = other DNA
aggatctgagaggtct

SEQ ID NO: 2192 - DNA, 16 bp, synthetic construct
  source 1..16: mol_type = other DNA
cctagttttggcctga

SEQ ID NO: 2193 - DNA, 16 bp, synthetic construct
  source 1..16: mol_type = other DNA
gcctactatgaccttc

SEQ ID NO: 2194 - DNA, 16 bp, synthetic construct
  source 1..16: mol_type = other DNA
gactctacgattccaa

SEQ ID NO: 2195 - DNA, 16 bp, synthetic construct
  source 1..16: mol_type = other DNA
gtgacctgggccaact

SEQ ID NO: 2196 - DNA, 16 bp, synthetic construct
  source 1..16: mol_type = other DNA
atcttagctagcttcc

SEQ ID NO: 2197 - DNA, 16 bp, synthetic construct
  source 1..16: mol_type = other DNA
gatatccatggcttca

SEQ ID NO: 2198 - DNA, 16 bp, synthetic construct
  source 1..16: mol_type = other DNA
catcatggttagtctt

SEQ ID NO: 2199 - DNA, 16 bp, synthetic construct
  source 1..16: mol_type = other DNA
cccaaattttgtgcag

SEQ ID NO: 2200 - DNA, 16 bp, synthetic construct
  source 1..16: mol_type = other DNA
atgagggtaacactga

SEQ ID NO: 2201 - DNA, 16 bp, synthetic construct
  source 1..16: mol_type = other DNA
acagggaactttagta

SEQ ID NO: 2202 - DNA, 16 bp, synthetic construct
  source 1..16: mol_type = other DNA
cgctggtgtgggtcac

SEQ ID NO: 2203 - DNA, 16 bp, synthetic construct
  source 1..16: mol_type = other DNA
agtggtggagccaagc

SEQ ID NO: 2204 - DNA, 16 bp, synthetic construct
  source 1..16: mol_type = other DNA
atgcatggagaatctc

SEQ ID NO: 2205 - DNA, 16 bp, synthetic construct
  source 1..16: mol_type = other DNA
agcctgctgtgactcc

SEQ ID NO: 2206 - DNA, 16 bp, synthetic construct
  source 1..16: mol_type = other DNA
gtcacacacagtttgt

SEQ ID NO: 2207 - DNA, 16 bp, synthetic construct
  source 1..16: mol_type = other DNA
aatttctaaggccccg

SEQ ID NO: 2208 - DNA, 16 bp, synthetic construct
  source 1..16: mol_type = other DNA
cgtttccgggcagcac

SEQ ID NO: 2209 - DNA, 16 bp, synthetic construct
  source 1..16: mol_type = other DNA
actgtctgaagactgc

SEQ ID NO: 2210 - DNA, 16 bp, synthetic construct
  source 1..16: mol_type = other DNA
ttgtatcctgttgctt

SEQ ID NO: 2211 - DNA, 16 bp, synthetic construct
  source 1..16: mol_type = other DNA
caactctggcctctta

SEQ ID NO: 2212 - DNA, 16 bp, synthetic construct
  source 1..16: mol_type = other DNA
gtaatgttgtccagta

SEQ ID NO: 2213 - DNA, 16 bp, synthetic construct
  source 1..16: mol_type = other DNA
tcccttgacatgtgac

SEQ ID NO: 2214 - DNA, 16 bp, synthetic construct
  source 1..16: mol_type = other DNA
gtctctccgtggtttc

SEQ ID NO: 2215 - DNA, 16 bp, synthetic construct
  source 1..16: mol_type = other DNA
aagatcgacttctcag

SEQ ID NO: 2216 - DNA, 16 bp, synthetic construct
  source 1..16: mol_type = other DNA
ggaatgattcagccaa

SEQ ID NO: 2217 - DNA, 16 bp, synthetic construct
  source 1..16: mol_type = other DNA
gtttatcccctactcc

SEQ ID NO: 2218 - DNA, 16 bp, synthetic construct
  source 1..16: mol_type = other DNA
gtcattggctgcttcc

SEQ ID NO: 2219 - DNA, 16 bp, synthetic construct
  source 1..16: mol_type = other DNA
ggacactgtggagtcc

SEQ ID NO: 2220 - DNA, 16 bp, synthetic construct
  source 1..16: mol_type = other DNA
ggtctggccgggagga

SEQ ID NO: 2221 - DNA, 16 bp, synthetic construct
  source 1..16: mol_type = other DNA
tgttttccctccgcct

SEQ ID NO: 2222 - DNA, 16 bp, synthetic construct
  source 1..16: mol_type = other DNA
caactttgggaagttc

SEQ ID NO: 2223 - DNA, 16 bp, synthetic construct
  source 1..16: mol_type = other DNA
tcatggtagcgcgcgc

SEQ ID NO: 2224 - DNA, 16 bp, synthetic construct
  source 1..16: mol_type = other DNA
ccagatggtcttgggc

SEQ ID NO: 2225 - DNA, 16 bp, synthetic construct
  source 1..16: mol_type = other DNA
gtggacgggatgtccc

SEQ ID NO: 2226 - DNA, 16 bp, synthetic construct
  source 1..16: mol_type = other DNA
taagagtaacggtcag

SEQ ID NO: 2227 - DNA, 16 bp, synthetic construct
  source 1..16: mol_type = other DNA
cgcatagccagccagc

SEQ ID NO: 2228 - DNA, 16 bp, synthetic construct
  source 1..16: mol_type = other DNA
gaaatggctgtcagct

SEQ ID NO: 2229 - DNA, 16 bp, synthetic construct
  source 1..16: mol_type = other DNA
cggagaaatggctgtc

SEQ ID NO: 2230 - DNA, 16 bp, synthetic construct
  source 1..16: mol_type = other DNA
aaagttccttggttgg

SEQ ID NO: 2231 - DNA, 16 bp, synthetic construct
  source 1..16: mol_type = other DNA
tcccatcagactcgct

SEQ ID NO: 2232 - DNA, 16 bp, synthetic construct
  source 1..16: mol_type = other DNA
attcccatcagactcg

SEQ ID NO: 2233 - DNA, 16 bp, synthetic construct
  source 1..16: mol_type = other DNA
tgccctaaaagttcct

SEQ ID NO: 2234 - DNA, 16 bp, synthetic construct
  source 1..16: mol_type = other DNA
cgtgggattcccatca

SEQ ID NO: 2235 - DNA, 16 bp, synthetic construct
  source 1..16: mol_type = other DNA
gccttttgcaagccct

SEQ ID NO: 2236 - DNA, 16 bp, synthetic construct
  source 1..16: mol_type = other DNA
aggacttcggctggac

SEQ ID NO: 2237 - DNA, 16 bp, synthetic construct
  source 1..16: mol_type = other DNA
ggccttttgcaagccc

SEQ ID NO: 2238 - DNA, 16 bp, synthetic construct
  source 1..16: mol_type = other DNA
ggtcctcaggacttcg

SEQ ID NO: 2239 - DNA, 16 bp, synthetic construct
  source 1..16: mol_type = other DNA
gaccactccaaactcc

SEQ ID NO: 2240 - DNA, 16 bp, synthetic construct
  source 1..16: mol_type = other DNA
gtggatcattccaggg

SEQ ID NO: 2241 - DNA, 16 bp, synthetic construct
  source 1..16: mol_type = other DNA
gaatatggagccctgg

SEQ ID NO: 2242 - DNA, 16 bp, synthetic construct
  source 1..16: mol_type = other DNA
agtttcggtggatcat

SEQ ID NO: 2243 - DNA, 16 bp, synthetic construct
  source 1..16: mol_type = other DNA
ggaatatggagccctg

SEQ ID NO: 2244 - DNA, 16 bp, synthetic construct
  source 1..16: mol_type = other DNA
aagtttcggtggatca

SEQ ID NO: 2245 - DNA, 16 bp, synthetic construct
  source 1..16: mol_type = other DNA
caggaatatggagccc

SEQ ID NO: 2246 - DNA, 16 bp, synthetic construct
  source 1..16: mol_type = other DNA
cgctctagattcagat

SEQ ID NO: 2247 - DNA, 16 bp, synthetic construct
  source 1..16: mol_type = other DNA
tccgacagtgtctcca

SEQ ID NO: 2248 - DNA, 16 bp, synthetic construct
  source 1..16: mol_type = other DNA
cccggcttgctgcctt

SEQ ID NO: 2249 - DNA, 16 bp, synthetic construct
  source 1..16: mol_type = other DNA
tgcgaaccaacgatag

SEQ ID NO: 2250 - DNA, 16 bp, synthetic construct
  source 1..16: mol_type = other DNA
cacctggcccgtctgc

SEQ ID NO: 2251 - DNA, 16 bp, synthetic construct
  source 1..16: mol_type = other DNA
acgacacctcgcccct

SEQ ID NO: 2252 - DNA, 16 bp, synthetic construct
  source 1..16: mol_type = other DNA
ggaagcacgacacctc

SEQ ID NO: 2253 - DNA, 16 bp, synthetic construct
  source 1..16: mol_type = other DNA
accccggcccagccgt

SEQ ID NO: 2254 - DNA, 16 bp, synthetic construct
  source 1..16: mol_type = other DNA
agttgcatgtgtcggt

SEQ ID NO: 2255 - DNA, 16 bp, synthetic construct
  source 1..16: mol_type = other DNA
cgtcctccaccaagtc

SEQ ID NO: 2256 - DNA, 16 bp, synthetic construct
  source 1..16: mol_type = other DNA
ccgtcctccaccaagt

SEQ ID NO: 2257 - DNA, 16 bp, synthetic construct
  source 1..16: mol_type = other DNA
aggagtagcccacaaa

SEQ ID NO: 2258 - DNA, 16 bp, synthetic construct
  source 1..16: mol_type = other DNA
agtaggagtagcccac

SEQ ID NO: 2259 - DNA, 16 bp, synthetic construct
  source 1..16: mol_type = other DNA
agttccatgggtgtgg

SEQ ID NO: 2260 - DNA, 16 bp, synthetic construct
  source 1..16: mol_type = other DNA
cagttccatgggtgtg

SEQ ID NO: 2261 - DNA, 16 bp, synthetic construct
  source 1..16: mol_type = other DNA
ggcggcggcacgagac

SEQ ID NO: 2262 - DNA, 16 bp, synthetic construct
  source 1..16: mol_type = other DNA
ggtttttccagaggct

SEQ ID NO: 2263 - DNA, 16 bp, synthetic construct
  source 1..16: mol_type = other DNA
aggtttttccagaggc

SEQ ID NO: 2264 - DNA, 16 bp, synthetic construct
  source 1..16: mol_type = other DNA
aaggtttttccagagg

SEQ ID NO: 2265 - DNA, 16 bp, synthetic construct
  source 1..16: mol_type = other DNA
gagatgttctgggaaa

SEQ ID NO: 2266 - DNA, 16 bp, synthetic construct
  source 1..16: mol_type = other DNA
cagattcactccccct

SEQ ID NO: 2267 - DNA, 16 bp, synthetic construct
  source 1..16: mol_type = other DNA
acctgcggcccccgcc

SEQ ID NO: 2268 - DNA, 16 bp, synthetic construct
  source 1..16: mol_type = other DNA
ggtttgatgtccctgc

SEQ ID NO: 2269 - DNA, 16 bp, synthetic construct
  source 1..16: mol_type = other DNA
acctgccacactctcc

SEQ ID NO: 2270 - DNA, 16 bp, synthetic construct
  source 1..16: mol_type = other DNA
tatcctgttgcttccc

SEQ ID NO: 2271 - DNA, 16 bp, synthetic construct
  source 1..16: mol_type = other DNA
aagtggcccctccagc

SEQ ID NO: 2272 - DNA, 16 bp, synthetic construct
  source 1..16: mol_type = other DNA
gttccaagactgatcc

SEQ ID NO: 2273 - DNA, 16 bp, synthetic construct
  source 1..16: mol_type = other DNA
taaggtcctccaactc

SEQ ID NO: 2274 - DNA, 16 bp, synthetic construct
  source 1..16: mol_type = other DNA
cgtgtgagccagggac

SEQ ID NO: 2275 - DNA, 16 bp, synthetic construct
  source 1..16: mol_type = other DNA
gttctcttagacaaag

SEQ ID NO: 2276 - DNA, 16 bp, synthetic construct
  source 1..16: mol_type = other DNA
aactgttctcttagac

SEQ ID NO: 2277 - DNA, 16 bp, synthetic construct
  source 1..16: mol_type = other DNA
gtctgcttctgttcag

SEQ ID NO: 2278 - DNA, 16 bp, synthetic construct
  source 1..16: mol_type = other DNA
tccgtggtttctgtct

SEQ ID NO: 2279 - DNA, 16 bp, synthetic construct
  source 1..16: mol_type = other DNA
atgtctgaagtaacct

SEQ ID NO: 2280 - DNA, 16 bp, synthetic construct
  source 1..16: mol_type = other DNA
gctctcgcctgaccac

SEQ ID NO: 2281 - DNA, 16 bp, synthetic construct
  source 1..16: mol_type = other DNA
atcaggattcccacct

SEQ ID NO: 2282 - DNA, 16 bp, synthetic construct
  source 1..16: mol_type = other DNA
gctgctcaaaatccct

SEQ ID NO: 2283 - DNA, 16 bp, synthetic construct
  source 1..16: mol_type = other DNA
tatgtccctctgctgc

SEQ ID NO: 2284 - DNA, 16 bp, synthetic construct
  source 1..16: mol_type = other DNA
atgatccaagccccct

SEQ ID NO: 2285 - DNA, 16 bp, synthetic construct
  source 1..16: mol_type = other DNA
atttctggaatcccca

SEQ ID NO: 2286 - DNA, 16 bp, synthetic construct
  source 1..16: mol_type = other DNA
cctgtagcctgtcagc

SEQ ID NO: 2287 - DNA, 16 bp, synthetic construct
  source 1..16: mol_type = other DNA
ccaggcccaccgccca

SEQ ID NO: 2288 - DNA, 16 bp, synthetic construct
  source 1..16: mol_type = other DNA
aggactgtctgcttcc

SEQ ID NO: 2289 - DNA, 16 bp, synthetic construct
  source 1..16: mol_type = other DNA
caggtaagagaccccc

SEQ ID NO: 2290 - DNA, 16 bp, synthetic construct
  source 1..16: mol_type = other DNA
gaccccagaaggtagg

SEQ ID NO: 2291 - DNA, 16 bp, synthetic construct
  source 1..16: mol_type = other DNA
gccctccaggaccttc

SEQ ID NO: 2292 - DNA, 16 bp, synthetic construct
  source 1..16: mol_type = other DNA
aaaaccaactgttctc

SEQ ID NO: 2293 - DNA, 16 bp, synthetic construct
  source 1..16: mol_type = other DNA
gaaaaccaactgttct

SEQ ID NO: 2294 - DNA, 16 bp, synthetic construct
  source 1..16: mol_type = other DNA
cccaccgttcaggccc

SEQ ID NO: 2295 - DNA, 16 bp, synthetic construct
  source 1..16: mol_type = other DNA
ctatgtccctctgctg

SEQ ID NO: 2296 - DNA, 16 bp, synthetic construct
  source 1..16: mol_type = other DNA
ggagcggttgtgaact

SEQ ID NO: 2297 - DNA, 16 bp, synthetic construct
  source 1..16: mol_type = other DNA
  modified_base 5: mod_base = OTHER; note = uracil
cgaatgtccgacagtg

SEQ ID NO: 2298 - DNA, 16 bp, synthetic construct
  source 1..16: mol_type = other DNA
cgaatgtccgacagtg

SEQ ID NO: 2299 - DNA, 16 bp, synthetic construct
  source 1..16: mol_type = other DNA
ttcccgaatgtccgac

SEQ ID NO: 2300 - DNA, 16 bp, synthetic construct
  source 1..16: mol_type = other DNA
  modified_base 5: mod_base = OTHER; note = uracil
caccttcccgaatgtc

SEQ ID NO: 2301 - DNA, 16 bp, synthetic construct
  source 1..16: mol_type = other DNA
caccttcccgaatgtc

SEQ ID NO: 2302 - DNA, 16 bp, synthetic construct
  source 1..16: mol_type = other DNA
gcaccttcccgaatgt

SEQ ID NO: 2303 - DNA, 16 bp, synthetic construct
  source 1..16: mol_type = other DNA
  modified_base 5: mod_base = OTHER; note = uracil
gttatatggctgattc

SEQ ID NO: 2304 - DNA, 16 bp, synthetic construct
  source 1..16: mol_type = other DNA
  modified_base 5: mod_base = OTHER; note = uracil
cttttattcgcgaggg

SEQ ID NO: 2305 - DNA, 16 bp, synthetic construct
  source 1..16: mol_type = other DNA
  modified_base 5: mod_base = OTHER; note = uracil
ggaatctatcatggct

SEQ ID NO: 2306 - DNA, 16 bp, synthetic construct
  source 1..16: mol_type = other DNA
cccgaatgtccgacag

SEQ ID NO: 2307 - DNA, 16 bp, synthetic construct
  source 1..16: mol_type = other DNA
gcactttgcgaaccaa

SEQ ID NO: 2308 - DNA, 16 bp, synthetic construct
  source 1..16: mol_type = other DNA
tgccccgggcactcag

SEQ ID NO: 2309 - DNA, 16 bp, synthetic construct
  source 1..16: mol_type = other DNA
gagtatacaggcatgc

SEQ ID NO: 2310 - DNA, 16 bp, synthetic construct
  source 1..16: mol_type = other DNA
gaactggcaggcggtg

SEQ ID NO: 2311 - DNA, 16 bp, synthetic construct
  source 1..16: mol_type = other DNA
acctggcccgtctgct

SEQ ID NO: 2312 - DNA, 16 bp, synthetic construct
  source 1..16: mol_type = other DNA
aaagcaaatttcccga

SEQ ID NO: 2313 - DNA, 16 bp, synthetic construct
  source 1..16: mol_type = other DNA
agtcggaggacgaggt

SEQ ID NO: 2314 - DNA, 16 bp, synthetic construct
  source 1..16: mol_type = other DNA
cctcttaggagtcttt

SEQ ID NO: 2315 - DNA, 16 bp, synthetic construct
  source 1..16: mol_type = other DNA
aaataccgaggaatgt

SEQ ID NO: 2316 - DNA, 16 bp, synthetic construct
  source 1..16: mol_type = other DNA
taaataccgaggaatg

SEQ ID NO: 2317 - DNA, 16 bp, synthetic construct
  source 1..16: mol_type = other DNA
ataaataccgaggaat

SEQ ID NO: 2318 - DNA, 16 bp, synthetic construct
  source 1..16: mol_type = other DNA
aataaataccgaggaa

SEQ ID NO: 2319 - DNA, 16 bp, synthetic construct
  source 1..16: mol_type = other DNA
caataaataccgagga

SEQ ID NO: 2320 - DNA, 16 bp, synthetic construct
  source 1..16: mol_type = other DNA
gacaataaataccgag

SEQ ID NO: 2321 - DNA, 16 bp, synthetic construct
  source 1..16: mol_type = other DNA
ataagcaatgcattat

SEQ ID NO: 2322 - DNA, 16 bp, synthetic construct
  source 1..16: mol_type = other DNA
tgataagcaatgcatt

SEQ ID NO: 2323 - DNA, 16 bp, synthetic construct
  source 1..16: mol_type = other DNA
atttacttgtgataag

SEQ ID NO: 2324 - DNA, 16 bp, synthetic construct
  source 1..16: mol_type = other DNA
tgttagtccactcgca

SEQ ID NO: 2325 - DNA, 16 bp, synthetic construct
  source 1..16: mol_type = other DNA
gtcgaagacagttcta

SEQ ID NO: 2326 - DNA, 16 bp, synthetic construct
  source 1..16: mol_type = other DNA
taaatatccaaaccgc

SEQ ID NO: 2327 - DNA, 16 bp, synthetic construct
  source 1..16: mol_type = other DNA
gcaaaagcaaatttcc

SEQ ID NO: 2328 - DNA, 16 bp, synthetic construct
  source 1..16: mol_type = other DNA
tatctaaagtggcccc

SEQ ID NO: 2329 - DNA, 16 bp, synthetic construct
  source 1..16: mol_type = other DNA
attcgcgagggtcggg

SEQ ID NO: 2330 - DNA, 16 bp, synthetic construct
  source 1..16: mol_type = other DNA
tattcgcgagggtcgg

SEQ ID NO: 2331 - DNA, 16 bp, synthetic construct
  source 1..16: mol_type = other DNA
ccttttattcgcgagg

SEQ ID NO: 2332 - DNA, 16 bp, synthetic construct
  source 1..16: mol_type = other DNA
gccttttattcgcgag

SEQ ID NO: 2333 - DNA, 16 bp, synthetic construct
  source 1..16: mol_type = other DNA
ggccttttattcgcga

SEQ ID NO: 2334 - DNA, 16 bp, synthetic construct
  source 1..16: mol_type = other DNA
gggccttttattcgcg

1. (canceled)

2. (canceled)

3. An oligomeric compound comprising a modified oligonucleotide consisting of 12 to 30 linked nucleosides, wherein the nucleobase sequence of the modified oligonucleotide is at least 80% complementary to an equal length portion of a DMPK nucleic acid, wherein the modified oligonucleotide has at least one modification selected from a modified sugar moiety and a modified internucleoside linkage, and wherein the nucleobase sequence of the modified oligonucleotide is at least 80% complementary to an equal length portion within:
nucleobases 9052-9103 of SEQ ID NO: 1;
nucleobases 9228-9256 of SEQ ID NO: 1;
nucleobases 9574-9610 of SEQ ID NO: 1;
nucleobases 10010-10043 of SEQ ID NO: 1;
nucleobases 10271-10298 of SEQ ID NO: 1;
nucleobases 10364-10391 of SEQ ID NO: 1;
nucleobases 10683-10707 of SEQ ID NO: 1;
nucleobases 10709-10734 of SEQ ID NO: 1;
nucleobases 10812-10857 of SEQ ID NO: 1;
nucleobases 11853-11879 of SEQ ID NO: 1;
nucleobases 13310-13350 of SEQ ID NO: 1;
nucleobases 13999-14046 of SEQ ID NO: 1;
nucleobases 14090-14118 of SEQ ID NO: 1;
nucleobases 14232-14258 of SEQ ID NO: 1;
nucleobases 17565-17594 of SEQ ID NO: 1;
nucleobases 17731-17761 of SEQ ID NO: 1;
nucleobases 19719-19753 of SEQ ID NO: 1;
nucleobases 19795-19869 of SEQ ID NO: 1;
nucleobases 19888-19942 of SEQ ID NO: 1;
nucleobases 19915-19942 of SEQ ID NO: 1;
nucleobases 20871-20905 of SEQ ID NO: 1;
nucleobases 21117-21153 of SEQ ID NO: 1; or
nucleobases 22118-22143 of SEQ ID NO: 1.

4. The oligomeric compound of claim 3, wherein the modified oligonucleotide has a nucleobase sequence comprising at least 12, 13, 14, 15, or 16 contiguous nucleobases of a nucleobase sequence selected from:
SEQ ID NOs: 132, 186, 256, 327, 446, 1374, 1596, 1667, 1747, 1818, 1895, 1964, 2038, 2121, 2191;
SEQ ID NOs: 510, 1173, 1668, 1748, 1819, 1896;
SEQ ID NOs: 1376, 1448, 1526, 1599, 1670;
SEQ ID NOs: 1823, 1900, 1969, 2043;
SEQ ID NOs: 1380, 1452, 1530, 1901, 1970, 2044, 2127, 2197;
SEQ ID NOs: 1206, 1381, 1453, 1531, 1604, 1971, 2045, 2128, 2198;
SEQ ID NOs: 640, 714, 821, 1172, 1677, 1757, 1828;
SEQ ID NOs: 43, 115, 202, 900, 960, 1027, 1195, 1905;
SEQ ID NOs: 1384, 1456, 1534, 1607, 1678, 1758;
SEQ ID NOs: 1387, 1977, 2051, 2134, 2204;
SEQ ID NOs: 1296, 1351, 1425, 1501, 1793, 1867, 1979, 2052, 2083, 2092, 2206;
SEQ ID NOs: 49, 159, 208, 293, 402, 471, 556, 618, 676, 692, 754, 817, 901, 971, 1038, 1744, 1791, 1863, 1960, 2016, 2119, 2163;
SEQ ID NOs: 1718, 1814, 1891, 1941;
SEQ ID NOs: 41, 140, 888, 981, 1033, 2081, 2154;
SEQ ID NOs: 444, 508, 573, 1874, 1949, 2060, 2103;
SEQ ID NOs: 274, 337, 410, 526, 575, 665, 712, 829, 897, 1397, 1467, 2138, 2210, 2270;
SEQ ID NOs: 1432, 1509, 1580, 1654, 1729, 1801;
SEQ ID NOs: 355, 412, 506, 567, 673, 747, 832, 904, 956, 1399, 1469, 1545, 1581, 1655, 1730, 1841, 1916, 1988, 1989, 2027, 2106, 2177;
SEQ ID NOs: 160, 249, 313, 371, 424, 503, 588, 647, 755, 789, 882, 1248-1254, 1263-1264, 1266-1273, 1284-1285, 1332, 1400, 1489, 1619, 1637, 1638, 1639, 1656, 1709, 2006, 2079, 2082, 2085, 2153, 2303;
SEQ ID NOs: 503, 588, 647, 755, 789, 882, 1263, 1264, 1332, 1400, 1619, 1637, 1638, 1639, 1656, 1709, 2006, 2079, 2082, 2085, 2153, 2303;
SEQ ID NOs: 144, 233, 291, 328, 435, 482, 564, 642, 748, 808, 874, 955, 1339, 1340, 1341, 1492, 1732, 1803, 2321, 2322, 2323;
SEQ ID NOs: 576, 652, 724, 811, 870, 1359, 1433, 1510, 1583, 1692; or
SEQ ID NOs: 696, 1255-1259, 1265, 1274-1277, 1283, 1330, and 1331.

5. (canceled)

6. An oligomeric compound comprising a modified oligonucleotide consisting of 12 to 30 linked nucleosides, wherein the nucleobase sequence of the modified oligonucleotide comprises at least 8, at least 9, at least 10, at least 11, at least 12, at least 13, at least 14, at least 15, or at least 16 contiguous nucleobases of the nucleobase sequence of any one of SEQ ID NOs: 18-2334, and wherein the modified oligonucleotide has at least one modification selected from a modified sugar moiety and a modified internucleoside linkage.

7. (canceled)

8. The oligomeric compound of claim 6, wherein the modified oligonucleotide has a nucleobase sequence comprising the nucleobase sequence of any one of SEQ ID NOs: 18-2334.

9. (canceled)

10. (canceled)

11. (canceled)

12. The oligomeric compound of claim 6, wherein the modified oligonucleotide consists of 16, 18, or 20 linked nucleosides.

13. (canceled)

14. (canceled)

15. The oligomeric compound of claim 6, wherein at least one nucleoside of the modified oligonucleotide comprises a modified sugar moiety, wherein the modified sugar moiety comprises a bicyclic sugar moiety, a non-bicyclic modified sugar moiety, or a sugar surrogate.

16. (canceled)

17. The oligomeric compound of claim 15, wherein the modified sugar moiety comprises a bicyclic sugar moiety, wherein the bicyclic sugar moiety comprises a 2′-4′ bridge selected from —O—CH₂—; and —O—CH(CH₃)—.

18. (canceled)

19. The oligomeric compound of claim 15, wherein the modified sugar moiety comprises a non-bicyclic sugar moiety, wherein the non-bicyclic modified sugar moiety is a 2′-MOE sugar moiety or a 2′-OMe sugar moiety.

20. (canceled)

21. The oligomeric compound of claim 6, wherein the modified oligonucleotide comprises at least one modified internucleoside linkage, wherein the at least one modified internucleoside linkage is a phosphorothioate internucleoside linkage, a mesyl phosphoramidate internucleoside linkage, or a methoxypropyl phosphonate internucleoside linkage.

22. (canceled)

23. (canceled)

24. (canceled)

25. (canceled)

26. The oligomeric compound of claim 6, wherein at least one internucleoside linkage of the modified oligonucleotide is a phosphodiester internucleoside linkage.

27. (canceled)

28. The oligomeric compound of claim 6, wherein each internucleoside linkage of the modified oligonucleotide is independently selected from a phosphodiester internucleoside linkage, a phosphorothioate internucleoside linkage, a mesyl phosphoramidate internucleoside linkage, or a methoxypropyl phosphonate internucleoside linkage.

29. (canceled)

30. (canceled)

31. The oligomeric compound of claim 21, wherein the internucleoside linkage motif of the modified oligonucleotide is selected from soooossssssssssooss, sssssssssssssss, sooossssssssssoooss, soosssssssssoooss, sooosssssssssooss, sooooossssssssssoss, soooosssssssssoss, ssssxssssssssss, sssssssssssss, soossssssssssos, sosssssssssssos, soosxssssssssos, ooooxoooooooooo, sssssxsssssssss, soossxsssssssos, wherein each “s” represents a phosphorothioate internucleoside linkage, each “o” represents a phosphodiester internucleoside linkage, and each “x” represents a methoxypropyl phosphonate internucleoside linkage.

32. The oligomeric compound of claim 6, wherein the modified oligonucleotide comprises at least one modified nucleobase, wherein the modified nucleobase is 5-methylcytosine.

33. (canceled)

34. (canceled)

35. The oligomeric compound of claim 6, wherein the modified oligonucleotide comprises a deoxy region.

36. (canceled)

37. (canceled)

38. (canceled)

39. The oligomeric compound of claim 35, wherein the deoxy region is flanked on the 5′-side by a 5′-external region consisting of 1-6 linked 5′-external region nucleosides and is flanked on the 3′-side by a 3′-external region consisting of 1-6 linked 3′-external region nucleosides; wherein:
the 3′-most nucleoside of the 5′ external region comprises a modified sugar moiety; and
the 5′-most nucleoside of the 3′ external region comprises a modified sugar moiety.

40. (canceled)

41. (canceled)

42. The oligomeric compound of claim 39, wherein the modified oligonucleotide has:
(a) a 5′ external region consisting of 5 linked nucleosides;
a deoxy region consisting of 10 linked nucleosides; and
a 3′ external region consisting of 5 linked nucleosides;
(b) a 5′ external region consisting of 6 linked nucleosides;
a deoxy region consisting of 10 linked nucleosides; and
a 3′ external region consisting of 4 linked nucleosides; or
(c) a 5′ external region consisting of 4 linked nucleosides;
a deoxy region consisting of 10 linked nucleosides; and
a 3′ external region consisting of 6 linked nucleosides,
wherein each of the 5′ external region nucleosides and each of the 3′ external region nucleosides is a 2′-MOE nucleoside.

43. (canceled)

44. (canceled)

45. The oligomeric compound of claim 39, wherein the modified oligonucleotide has:
a 5′ external region consisting of 3 linked nucleosides;
a deoxy region consisting of 10 linked nucleosides; and
a 3′ external region consisting of 3 linked nucleosides;
wherein each of the 5′ external region nucleosides and each of the 3′ external region nucleosides is a cEt nucleoside.

46. The oligomeric compound of claim 39, wherein the modified oligonucleotide has:
a 5′ external region consisting of 1-6 linked nucleosides;
a deoxy region consisting of 6-10 linked nucleosides; and
a 3′ external region consisting of 1-6 linked nucleosides;
wherein each of the 5′ external region nucleosides and each of the 3′ external region nucleosides is independently selected from a cEt nucleoside or a 2′-MOE nucleoside, and each of the deoxy region nucleosides is a 2′-β-D-deoxynucleoside.

47. The oligomeric compound of claim 39, wherein the modified oligonucleotide has a sugar motif comprising:
a 5′ external region consisting of 3-6 linked nucleosides;
a deoxy region consisting of 7-8 linked nucleosides; and
a 3′ external region consisting of 3-6 linked nucleosides;
wherein each of the 3′ external region nucleosides is independently selected from a 2′-MOE nucleoside and a cEt nucleoside, and the 5′ external region has the following formula:
(Nk)n(Nd)(Nx)
wherein each Nk is a bicyclic nucleoside, Nx is 2′-OMe nucleoside, Nd is a 2′-β-D-deoxynucleoside, and n is from 1-4.

48. The oligomeric compound of claim 6, wherein the modified oligonucleotide has a sugar motif (5′ to 3′) selected from: eeeeeddddddddddeeeee, kkkddddddddddkkk, eekkddddddddkkee, eeeeddddddddddeeeeee, eeeeddddddddeeeeee, eeeeeddddddddeeeee, eeeeeeddddddddddeeee, eeeeeeddddddddeeee, kkkedddddddddkkk, kkkdyddddddddkkk, kkeddddddddddkkk, kekddddddddddkkk, ekkddddddddddkke, kkddddddddddkk, ekkkddddddddkkke, ekkddddddddddkkk, kkkddddddddddkke, kkkdd[5′-(S)-Me-d]dddddddkkk, kkkdd[5′-(R)-Me-d]dddddddkkk, kkkdd[5′-(R)-allyl-d]dddddddkkk, kkkddd[5′-(R)-Me-d]ddddddkkk, wherein each “d” represents a 2′-ββ-D-deoxyribosyl sugar moiety, each “e” represents a 2′-MOE sugar moiety, each “y” represents a 2′-OMe sugar moiety, each “[5′-(S)-Me-d]” represents a 5′-(S)-methyl-β-D-2′-deoxyribosyl sugar moiety, each “[5′-(R)-Me-d]” represents a 5′-(R)-methyl-β-D-2′-deoxyribosyl sugar moiety, and each “[5′-(R)-allyl-d]” represents a 5′-(R)-allyl-β-D-2′-deoxyribosyl sugar moiety, and each “k” represents a cEt sugar moiety.

49. The oligomeric compound of claim 6, wherein the oligomeric compound comprises a conjugate group, wherein the conjugate group comprises a conjugate linker and a conjugate moiety.

50. (canceled)

51. (canceled)

52. (canceled)

53. The oligomeric compound of claim 49, wherein the conjugate moiety is a 6-palmitamidohexyl conjugate moiety.

54. The oligomeric compound of claim 49, wherein the conjugate linker is a phosphodiester linker.

55. The oligomeric compound of claim 49, wherein the conjugate group has the following structure:

[chemical structure]

56. The oligomeric compound of claim 49, wherein the conjugate linker consists of a single bond.

57. The oligomeric compound of claim 49, wherein the conjugate linker is cleavable.

58. (canceled)

59. (canceled)

60. The oligomeric compound of claim 49, wherein the conjugate group is attached to the modified oligonucleotide at the 5′-end of the modified oligonucleotide or at the 3′-end of the modified oligonucleotide.

61.-67. (canceled)

68. A population of oligomeric compounds of claim 6, wherein all of the phosphorothioate internucleoside linkages of the modified oligonucleotide are stereorandom.

69.-73. (canceled)

74. A pharmaceutical composition comprising the oligomeric compound of claim 6, and a pharmaceutically acceptable diluent.

75. The pharmaceutical composition of claim 74, wherein the pharmaceutically acceptable diluent is phosphate-buffered saline or artificial cerebrospinal fluid.

76. The pharmaceutical composition of claim 75, wherein the pharmaceutical composition consists essentially of the oligomeric compound and phosphate-buffered saline or artificial cerebrospinal fluid.

77. (canceled)

78. A method of treating a disease associated with DMPK, comprising administering to a subject having the disease associated with DMPK a therapeutically effective amount of the oligomeric compound of claim 6, thereby treating the disease associated with DMPK.

79. The method of claim 78, wherein the disease associated with DMPK is type 1 myotonic dystrophy, wherein administering the oligomeric compound reduces one or more of muscle stiffness, myotonia, disabling distal weakness, weakness in face and jaw muscles, difficulty in swallowing, drooping of the eyelids (ptosis), weakness of neck muscles, weakness in arm and leg muscles, persistent muscle pain, hypersomnia, muscle wasting, dysphagia, respiratory insufficiency, irregular heartbeat, heart muscle damage, apathy, insulin resistance, and cataracts, and wherein the subject is human.

80.-87. (canceled)
